(19) United States
(12) Patent Application Publication
(10) Pub. No.: US 2023/0234992 A1
(43) Pub. Date: Jul. 27, 2023

(54) MODIFIED BETACORONAVIRUS SPIKE PROTEINS

(71) Applicant: GLAXOSMITHKLINE BIOLOGICALS SA, Rixensart (BE)

(72) Inventors: Marco BIANCUCCI, Rockville, MD (US); Joel David KARPIAK, Collegeville, PA (US); Jason Paul LALIBERTE, Rockville, MD (US); Anna Ulrika LOWEGARD, Stevenage, Hertfordshire (GB); Enrico MALITO, Rockville, MD (US); Newton Muchugu WAHOME, Rockville, MD (US)

(73) Assignee: GLAXOSMITHKLINE BIOLOGICALS SA, Rixensart (BE)

(21) Appl. No.: 18/007,931

(22) PCT Filed: Jun. 4, 2021
(86) PCT No.: PCT/IB2021/054903

§ 371 Date: Dec. 2, 2022

Related U.S. Application Data
(60) Provisional application No. 63/035,319, filed on Jun. 5, 2020.

(51) Int. Cl. C07K 14/165; C12N 15/11; A61K 39/215; A61P 31/14

(52) U.S. Cl. CPC C07K 14/165; C12N 15/11; A61K 39/215; A61P 31/14; A61K 2039/575

(57) ABSTRACT

Betacoronavirus Spike proteins, or fragments thereof, including substitution mutations designed to increase stability, decrease the risk of antibody dependent enhancement, or both; and that are useful in, for example, immunogenic compositions.

### CROSS-REFERENCE TO RELATED APPLICATION

[0001] This application is related to and claims priority to U.S. Provisional Application No. 63/035,319 filed on Jun. 5, 2020, the entire contents of which is hereby incorporated by reference.

### SEQUENCE LISTING

[0002] The instant application contains an electronically submitted Sequence Listing in ASCII text file format (Name: 2021-06-02 2801-0358PWO1_ST25.txt; Size 1.23 MB; created Jun. 2, 2021) which is hereby incorporated by reference in its entirety.

### BACKGROUND

[0003] Coronaviruses are spherical and enveloped, positive-sense single-stranded RNA viruses. They have the largest genomes (26-32 kb) among known RNA viruses, and are phylogenetically divided into four genera (alpha, beta, gamma, delta), with betacoronaviruses further subdivided into four lineages (A, B, C, D). Coronaviruses infect a wide range of avian and mammalian species, including humans. Of the seven known coronaviruses to emerge in the human population, four of them (HCoV-OC43 (betacoronavirus), HCoV-229E (alphacoronavirus), HCoV-HKU1 (betacoronavirus) and HCoV-NL63 (alphacoronavirus)) are known to circulate annually in humans and generally cause mild upper respiratory diseases in immunocompetent hosts, although severe infections can be caused in infants, young children, elderly individuals, and the immunocompromised. Both HCoV-OC43 and HCoV-HKU1 cause self-limiting, common cold-like illnesses. Wang et al. 2020 Cell 181: 894-904. In contrast, the Middle East respiratory syndrome coronavirus (MERS-CoV) and the severe acute respiratory syndrome coronavirus 1 (SARS-CoV-1), belonging to betacoronavirus lineages C and B, respectively, are highly pathogenic. Cui et al. 2019 Nat. Rev. Microbiol. 17(3):181-192. Recent work on prefusion coronavirus spike proteins and their use is reported in WO 2018/081318. This publication discusses, in particular, recombinant coronavirus spike (S) proteins, such as Middle East respiratory syndrome (MERS-CoV) and severe acute respiratory coronavirus (SARS-CoV) S proteins, that are stabilized in a prefusion conformation by one or more amino acid substitutions. For example, it is reported in Carnell et al. 2021 doi.org/10.1101/2021.01.14.426695 and Xiong et al. 2020 Nat Struct Mol Biol 27(10):934-941 that two cysteine residues can be introduced that form a disulfide bond that constrains the trimer in a closed state, which results in improvement of trimer stability.

[0004] It is unclear whether the latest betacoronavirus to emerge in the human population, severe acute respiratory syndrome coronavirus 2 (SARS-CoV-2), also of lineage B, will circulate annually in humans. What is unfortunately clear, is that SARS-CoV-2, like MERS-CoV and SARS-CoV-1, is highly pathogenic. MERS-CoV, SARS-CoV-1, and SARS-CoV-2 all crossed the species barrier into humans and caused outbreaks of severe, often fatal, respiratory diseases: MERS-CoV in about 2012, SARS-CoV-1 in about 2002/2003, and SARS-CoV-2 in about 2019/2020. See Letko et al. 2020 Nat. Microbio. 5: 562-569.

[0005] The high fatality rate and absence of prophylactic or therapeutic measures against betacoronaviruses have created an urgent need for an effective treatment or prevention of betacoronavirus infections and the disease(s) such infections cause. In the context of vaccination, this is a need to provide a betacoronavirus antigen that may be delivered to the body for presentation to the immune system.

### SUMMARY OF THE INVENTION

[0006] The present inventors provide modified betacoronavirus antigens, specifically modified Spike (S) proteins or S protein fragments, that include one or more substitution mutations designed to increase stability or decrease the risk of antibody dependent enhancement; features desirable of a candidate betacoronavirus vaccine antigen.

[0007] Certain embodiments provide a betacoronavirus Spike (S) protein, or fragment thereof, comprising an amino acid sequence that has amino acid substitutions, wherein said amino acid substitutions are selected from those listed in one of columns #4-13 in Table 1. Certain further embodiments provide a betacoronavirus Spike (S) protein, or fragment thereof, comprising an amino acid sequence that has at least 80% sequence identity to the entire sequence of at least one of SEQ ID NOs: 5-14.

[0008] Certain embodiments provide a betacoronavirus Spike (S) protein, or fragment thereof, comprising an amino acid sequence that has amino acid substitutions, wherein said amino acid substitutions are selected from those listed in one of columns #4-18 in Table 2. Certain further embodiments provide a betacoronavirus Spike (S) protein, or fragment thereof, comprising an amino acid sequence that has at least 80% sequence identity to the entire sequence of at least one of SEQ ID NOs: 15-29.

[0009] Certain embodiments provide a betacoronavirus Spike (S) protein, or fragment thereof, comprising an amino acid sequence that has amino acid substitutions, wherein said amino acid substitutions are selected from those listed in one of columns #4-8 in Table 3. Certain further embodiments provide a betacoronavirus Spike (S) protein, or fragment thereof, comprising an amino acid sequence that has at least 80% sequence identity to the entire sequence of at least one of SEQ ID NOs: 30-34.

[0010] Certain embodiments provide a betacoronavirus Spike (S) protein, or fragment thereof, comprising an amino acid sequence that has disulfide bridge mutations, for example:

[0011] Cysteines at the positions that correspond to residues 744 and 989 of the sequence SEQ ID NO: 3,

[0012] Cysteines at the positions that correspond to residues 813 and 836 of the sequence SEQ ID NO: 3,

[0013] Cysteines at the positions that correspond to residues 544 and 941 of the sequence SEQ ID NO: 3,

[0014] Cysteines at the positions that correspond to residues 824 and 560 of the sequence SEQ ID NO: 3,

[0015] Cysteines at the positions that correspond to residues 387 and 961 of the sequence SEQ ID NO: 3,

[0016] Cysteines at the positions that correspond to residues 357 and 959 of the sequence SEQ ID NO: 3,

[0017] Cysteines at the positions that correspond to residues 356 and 957 of the sequence SEQ ID NO: 3,

[0018] Cysteines at the positions that correspond to residues 15 and 494 of the sequence SEQ ID NO: 3,

[0019] Cysteines at the positions that correspond to residues 496 and 518 of the sequence SEQ ID NO: 3, or

[0020] Cysteines at the positions that correspond to residues 495 and 538 of the sequence SEQ ID NO: 3.

[0021] Certain further embodiments provide a betacoronavirus Spike (S) protein, or fragment thereof, comprising an amino acid sequence that has at least 80% sequence identity to the entire sequence of at least one of SEQ ID NOs: 35-64. Certain embodiments provide a betacoronavirus Spike (S) protein, or a fragment thereof, comprising an amino acid sequence that has amino acid substitutions, wherein the amino acid substitutions:

[0022] do not consist of Cysteines at the positions that correspond to residues 357 and 959 of the sequence SEQ ID NO: 3,

[0023] do not consist of Cysteines at the positions that correspond to residues 359 and 385 of the sequence SEQ ID NO: 3,

[0024] do not consist of Cysteines at the positions that correspond to residues 387 and 961 of the sequence SEQ ID NO: 3, and/or

[0025] do not consist of Cysteines at the positions that correspond to residues 643 and 840 of the sequence SEQ ID NO: 3.

[0026] Certain embodiments provide a betacoronavirus Spike (S) protein, or fragment thereof, comprising an amino acid sequence that has one or more receptor binding mutation, for example:

[0027] F, L, M, W, or Y at the position that corresponds to residue 391 of the sequence SEQ ID NO: 3;

[0028] A at the position that corresponds to residue 423 of the sequence SEQ ID NO: 3;

[0029] A at the position that corresponds to residue 427 of the sequence SEQ ID NO: 3;

[0030] A, H, M, N, or W at the position that corresponds to residue 429 of the sequence SEQ ID NO: 3;

[0031] H, I, W, or Y at the position that corresponds to residue 430 of the sequence SEQ ID NO: 3;

[0032] W at the position that corresponds to residue 447 of the sequence SEQ ID NO: 3;

[0033] M at the position that corresponds to residue 449 of the sequence SEQ ID NO: 3;

[0034] T at the position that corresponds to residue 450 of the sequence SEQ ID NO: 3;

[0035] H, I, L, M, N, P, T, W, or Y at the position that corresponds to residue 460 of the sequence SEQ ID NO: 3;

[0036] F, L, M, or Q at the position that corresponds to residue 461 of the sequence SEQ ID NO: 3; or

[0037] A, Y, F, R, M, C, G, or V at the position that corresponds to residue 467 of the sequence SEQ ID NO: 3.

[0038] Certain further embodiments provide a betacoronavirus Spike (S) protein, or fragment thereof, comprising an amino acid sequence that has at least 80% sequence identity to the entire sequence of at least one of SEQ ID NOs: 65-104.

[0039] Certain embodiments provide a betacoronavirus Spike (S) protein, or fragment thereof, comprising an amino acid sequence that has one or more glycan mutation, for example:

[0040] N at the position that corresponds to residue 391 of the sequence SEQ ID NO: 3 and T at the position that corresponds to residue 393 of the sequence SEQ ID NO: 3;

[0041] N at the position that corresponds to residue 423 of the sequence SEQ ID NO: 3 and T at the position that corresponds to residue 425 of the sequence SEQ ID NO: 3;

[0042] N at the position that corresponds to residue 427 of the sequence SEQ ID NO: 3 and T at the position that corresponds to residue 429 of the sequence SEQ ID NO: 3;

[0043] N at the position that corresponds to residue 429 of the sequence SEQ ID NO: 3 and T at the position that corresponds to residue 431 of the sequence SEQ ID NO: 3;

[0044] N at the position that corresponds to residue 430 of the sequence SEQ ID NO: 3 and T at the position that corresponds to residue 432 of the sequence SEQ ID NO: 3;

[0045] N at the position that corresponds to residue 447 of the sequence SEQ ID NO: 3 and T at the position that corresponds to residue 449 of the sequence SEQ ID NO: 3;

[0046] N at the position that corresponds to residue 449 of the sequence SEQ ID NO: 3 and T at the position that corresponds to residue 451 of the sequence SEQ ID NO: 3;

[0047] N at the position that corresponds to residue 450 of the sequence SEQ ID NO: 3;

[0048] T at the position that corresponds to residue 463 of the sequence SEQ ID NO: 3; or

[0049] N at the position that corresponds to residue 467 of the sequence SEQ ID NO: 3 and T at the position that corresponds to residue 469 of the sequence SEQ ID NO: 3.

[0050] Certain further embodiments provide a betacoronavirus Spike (S) protein, or fragment thereof, comprising an amino acid sequence that has at least 80% sequence identity to the entire sequence of at least one of SEQ ID NOs: 105-114.

[0051] Certain further embodiments provide a betacoronavirus Spike (S) protein, or fragment thereof, comprising an amino acid sequence that has at least 80% sequence identity to the entire sequence of at least one of SEQ ID NOs: 5-114.

[0052] Certain embodiments provide a betacoronavirus Spike (S) protein, or a fragment thereof, comprising an amino acid sequence that has amino acid substitutions, wherein the amino acid substitutions:

[0053] do not consist of a Leucine at the position corresponding to residue 544 of the sequence SEQ ID NO: 3, an Isoleucine at the position corresponding to residue 546 of the sequence SEQ ID NO: 3, a Tyrosine at the position corresponding to residue 829 of the sequence SEQ ID NO: 3, and an Isoleucine at the position corresponding to residue 830 of the sequence SEQ ID NO: 3;

[0054] do not consist of a Leucine at the position corresponding to residue 372 of the sequence SEQ ID NO: 3, Leucine at the position corresponding to residue 488 of the sequence SEQ ID NO: 3, and Leucine at the position corresponding to residue 490 of the sequence SEQ ID NO: 3; and/or

[0055] do not consist of Isoleucine at the position corresponding to residue 480 of the sequence SEQ ID NO: 3 and Leucine at the position corresponding to residue 544 of the sequence SEQ ID NO: 3.

[0056] In certain embodiments, the betacoronavirus Spike (S) protein, or fragment thereof, is a lineage B or C betacoronavirus Spike (S) protein, or fragment thereof (such as MERS-CoV, SARS-CoV1, SARS-CoV2). Certain further embodiments provide a lineage B betacoronavirus Spike (S) protein, or fragment thereof (such as SARS-CoV1, SARS-CoV2). Certain other embodiments provide a MERS-CoV, SARS-CoV1, or SARS-CoV2 Spike (S) protein, or fragment thereof. Certain other embodiments provide a SARS-CoV1 or SARS-CoV2 Spike (S) protein, or fragment thereof. Certain other embodiments provide a SARS-CoV2 Spike (S) protein, or fragment thereof.

[0057] In certain embodiments, the modified betacoronavirus S protein or S protein fragment comprises a transmembrane domain (such as a Full Length or CT-Deleted betacoronavirus S protein). In certain further embodiments, the S protein fragment is the Receptor Binding Domain. Certain other embodiments provide a non-human host cell or cell culture comprising the modified betacoronavirus S protein or S protein fragment.

[0058] In certain embodiments, the betacoronavirus S protein or S protein fragment, or a polynucleotide encoding the betacoronavirus S protein or S protein fragment, is operably linked to a nanoparticle. In certain further embodiments the S protein fragment is the Receptor Binding Domain.

[0059] In certain embodiments, is provided a nucleic acid molecule comprising a polynucleotide sequence that encodes the betacoronavirus S protein, or S protein fragment. In certain embodiments, the nucleic acid molecule is a Self-Amplifying RNA Molecule. In certain further embodiments, the Self-Amplifying RNA Molecule comprises, from 5′-3′, a polynucleotide comprising the sequence SEQ ID NO: 119; a polynucleotide sequence that encodes the betacoronavirus S protein, or S protein fragment; and a polynucleotide comprising the sequence SEQ ID NO: 120. In certain embodiments, the polynucleotide encodes a betacoronavirus S protein or S protein fragment that comprises a transmembrane domain (such as a Full Length or CT-Deleted betacoronavirus S protein). In certain further embodiments, the S protein fragment is the Receptor Binding Domain. Certain other embodiments provide a non-human host cell, cell culture, or vector (e.g., recombinant vector) comprising the nucleic acid molecule.

[0060] Certain embodiments provide an immunogenic composition comprising (i) the betacoronavirus S protein, or S protein fragment, optionally further comprising an adjuvant; or (ii) a nucleic acid molecule comprising a polynucleotide sequence that encodes the betacoronavirus S protein, or S protein fragment. In certain embodiments, the immunogenic composition comprises a carrier (e.g., a nanoparticle). In certain embodiments, the immunogenic composition is for use in inducing an immune response against betacoronavirus; inducing neutralizing antibodies against betacoronavirus; reducing cell entry by betacoronavirus; reducing cell-to-cell spread of betacoronavirus; reducing betacoronavirus entry into cells; or preventing, or reducing the severity of, betacoronavirus-associated diseases. Certain embodiments provide use of the immunogenic composition for inducing an immune response against betacoronavirus; inducing neutralizing antibodies against betacoronavirus; reducing cell entry by betacoronavirus; reducing cell-to-cell spread of betacoronavirus; reducing betacoronavirus entry into cells; or preventing, or reducing the severity of, betacoronavirus-associated diseases. Certain embodiments provide use of the immunogenic composition for the manufacture of a medicament for inducing an immune response against betacoronavirus; inducing neutralizing antibodies against betacoronavirus; reducing cell entry by betacoronavirus; reducing cell-to-cell spread of betacoronavirus; reducing betacoronavirus entry into cells; or preventing, or reducing the severity of, betacoronavirus-associated diseases.

[0061] Certain embodiments provide a method of inducing an immune response against betacoronavirus; inducing neutralizing antibodies against betacoronavirus; reducing cell entry by betacoronavirus; reducing cell-to-cell spread of betacoronavirus; reducing betacoronavirus entry into cells; or preventing, or reducing the severity of, betacoronavirus-associated diseases; comprising: delivering to a subject an immunologically effective amount of the immunogenic composition. In certain embodiments, delivering comprises administering to a human subject an immunologically effective amount of an immunogenic composition that comprises a modified betacoronavirus S protein, or S protein fragment. In certain embodiments, delivering comprises administering to a human subject an immunologically effective amount of an immunogenic composition that comprises a nucleic acid molecule comprising a polynucleotide sequence that encodes a modified betacoronavirus S protein, or S protein fragment.

[0062] In certain further embodiments, the immunogenic composition further comprises an adjuvant.

[0063] Certain embodiments provide a method of making a modified betacoronavirus Spike (S) protein, or S protein fragment, comprising: culturing, under suitable conditions, a non-human host cell that comprises a nucleic acid molecule that encodes the modified betacoronavirus Spike (S) protein or S protein fragment. In certain further embodiments, the modified betacoronavirus S protein or S protein fragment is purified from the non-human host cells or culture media.

[0064] In another embodiment, the present invention is directed to a betacoronavirus Spike (S) protein, or a fragment thereof, according to any of the above or below embodiments of the invention, wherein the betacoronavirus Spike (S) protein, or a fragment thereof has one or more of the following characteristics: the mammalian cellular expression of said protein or fragment is greater than 5 fold of that of SEQ ID NO: 4; the ACE2 Receptor binding of said protein or fragment is less than the ACE2 Receptor binding to that of SEQ ID NO:4; the binding of neutralizing antibodies to said protein or fragment is greater than the binding of neutralizing antibodies to that of SEQ ID NO:4, and/or the thermostability of said protein or fragment is greater than that of SEQ ID NO:4.

[0065] In another embodiment, the present invention also relates modified betacoronavirus antigens that are based on the mutant strain B.1.351 strain (20H/501Y.V2, a South African strain, Madhi et al. 2021 N Engl J Med 384: 1885-1898, Cele et al. 2021 medRxiv doi.org/10.1101/2021.01.26.21250224, www.beiresources.org/Catalog/animalviruses/NR-54009.aspx), where the Wuhan wild-type S protein sequence (SEQ ID NO: 2) was mutated with the D215G, K417N, E484K, N501Y, D614G mutations, specifically modified Spike (S) proteins or S protein fragments, that include one or more substitution mutations designed to increase stability or decrease the risk of antibody dependent enhancement; features desirable of a candidate betacoronavirus vaccine antigen. The D215G, K417N, E484K, N501Y, D614G mutation in the mutant strain B.1.351 strain corresponds to the D202G, K404N, E471K, N488Y, D601G mutations, respectively, shown in SEQ ID NOs:125-134 (in bold type and underlined). These modified betacorona virus antigens are identified as SEQ ID NOs:125-134. Thus, as to the antigens that are based on the mutant strain B.1.351 strain (20H/501Y.V2), the features of the invention also apply to these modified betacoronavirus antigens that are based on the mutant strain B.1.351 strain. For example, in the above description, where a sequence identify of at a specific % or at least a specific % to the entire sequence of a specified sequence or sequences is discussed, those same sequence identity requirements would apply to a comparison with the same specified sequence or sequences, alternatively, the corresponding part of the sequence of mutant strain B.1.351. To the extent that other descriptions of modified betacoronavirus antigens (including preparation thereof, formulations thereof, uses thereof and the like) are not inconsistent, all descriptions of this embodiment of invention (the embodiment based on the mutant strain B.1.351 strain and exemplified by SEQ ID NOs:125-134) apply to modified betacoronavirus antigens based on mutant strain B.1.351 strain.

[0066] Other embodiments of the invention include the following:

[0067] 1. A betacoronavirus Spike (S) protein, or fragment thereof, comprising an amino acid sequence that has amino acid substitutions, wherein said amino acid substitutions are selected from:

[0068] the substitute amino acids listed throughout rows 3-134 of column #4 in Table 1, wherein each substitute amino acid is located at the position that corresponds to the residue number of SEQ ID NO: 3 that is listed in the same row of column #1 in Table 1;

[0069] the substitute amino acids listed throughout rows 3-134 of column #5 in Table 1, wherein each substitute amino acid is located at the position that corresponds to the residue number of SEQ ID NO: 3 that is listed in the same row of column #1 in Table 1;

[0070] the substitute amino acids listed throughout rows 3-134 of column #6 in Table 1, wherein each substitute amino acid is located at the position that corresponds to the residue number of SEQ ID NO: 3 that is listed in the same row of column #1 in Table 1;

[0071] the substitute amino acids listed throughout rows 3-134 of column #7 in Table 1, wherein each substitute amino acid is located at the position that corresponds to the residue number of SEQ ID NO: 3 that is listed in the same row of column #1 in Table 1;

[0072] the substitute amino acids listed throughout rows 3-134 of column #8 in Table 1, wherein each substitute amino acid is located at the position that corresponds to the residue number of SEQ ID NO: 3 that is listed in the same row of column #1 in Table 1;

[0073] the substitute amino acids listed throughout rows 3-134 of column #9 in Table 1, wherein each substitute amino acid is located at the position that corresponds to the residue number of SEQ ID NO: 3 that is listed in the same row of column #1 in Table 1;

[0074] the substitute amino acids listed throughout rows 3-134 of column #10 in Table 1, wherein each substitute amino acid is located at the position that corresponds to the residue number of SEQ ID NO: 3 that is listed in the same row of column #1 in Table 1;

[0075] the substitute amino acids listed throughout rows 3-134 of column #11 in Table 1, wherein each substitute amino acid is located at the position that corresponds to the residue number of SEQ ID NO: 3 that is listed in the same row of column #1 in Table 1;

[0076] the substitute amino acids listed throughout rows 3-134 of column #12 in Table 1, wherein each substitute amino acid is located at the position that corresponds to the residue number of SEQ ID NO: 3 that is listed in the same row of column #1 in Table 1; or

[0077] the substitute amino acids listed throughout rows 3-134 of column #13 in Table 1, wherein each substitute amino acid is located at the position that corresponds to the residue number of SEQ ID NO: 3 that is listed in the same row of column #1 in Table 1.

[0078] 2. The betacoronavirus Spike (S) protein, or fragment thereof, of embodiment 1 comprising:

[0079] an amino acid sequence that has the substitutions of (a) and has at least 80% sequence identity to the entire sequence SEQ ID NO: 5,

[0080] an amino acid sequence that has the substitutions of (b) and has at least 80% sequence identity to the entire sequence SEQ ID NO: 6,

[0081] an amino acid sequence that has the substitutions of (c) and has at least 80% sequence identity to the entire sequence SEQ ID NO: 7,

[0082] an amino acid sequence that has the substitutions of (d) and has at least 80% sequence identity to the entire sequence SEQ ID NO: 8,

[0083] an amino acid sequence that has the substitutions of (e) and has at least 80% sequence identity to the entire sequence SEQ ID NO: 9,

[0084] an amino acid sequence that has the substitutions of (f) and has at least 80% sequence identity to the entire sequence SEQ ID NO: 10,

[0085] an amino acid sequence that has the substitutions of (g) and has at least 80% sequence identity to the entire sequence SEQ ID NO: 11,

[0086] an amino acid sequence that has the substitutions of (h) and has at least 80% sequence identity to the entire sequence SEQ ID NO: 12,

[0087] an amino acid sequence that has the substitutions of (i) and has at least 80% sequence identity to the entire sequence SEQ ID NO: 13, or

[0088] an amino acid sequence that has the substitutions of (j) and has at least 80% sequence identity to the entire sequence SEQ ID NO: 14.

[0089] 3. A betacoronavirus Spike (S) protein, or fragment thereof, comprising an amino acid sequence that has amino acid substitutions, wherein said amino acid substitutions are selected from:

[0090] the substitute amino acids listed throughout rows 3-145 of column #4 in Table 2, wherein each substitute amino acid is located at the position that corresponds to the residue number of SEQ ID NO: 3 that is listed in the same row of column #1 in Table 2;

[0091] the substitute amino acids listed throughout rows 3-145 of column #5 in Table 2, wherein each substitute amino acid is located at the position that corresponds to the residue number of SEQ ID NO: 3 that is listed in the same row of column #1 in Table 2;

[0092] the substitute amino acids listed throughout rows 3-145 of column #6 in Table 2, wherein each substitute amino acid is located at the position that corresponds to the residue number of SEQ ID NO: 3 that is listed in the same row of column #1 in Table 2;

[0093] the substitute amino acids listed throughout rows 3-145 of column #7 in Table 2, wherein each substitute amino acid is located at the position that corresponds to the residue number of SEQ ID NO: 3 that is listed in the same row of column #1 in Table 2;

[0094] the substitute amino acids listed throughout rows 3-145 of column #8 in Table 2, wherein each substitute amino acid is located at the position that corresponds to the residue number of SEQ ID NO: 3 that is listed in the same row of column #1 in Table 2;

[0095] the substitute amino acids listed throughout rows 3-145 of column #9 in Table 2, wherein each substitute amino acid is located at the position that corresponds to the residue number of SEQ ID NO: 3 that is listed in the same row of column #1 in Table 2;

[0096] the substitute amino acids listed throughout rows 3-145 of column #10 in Table 2, wherein each substitute amino acid is located at the position that corresponds to the residue number of SEQ ID NO: 3 that is listed in the same row of column #1 in Table 2;

[0097] the substitute amino acids listed throughout rows 3-145 of column #11 in Table 2, wherein each substitute amino acid is located at the position that corresponds to the residue number of SEQ ID NO: 3 that is listed in the same row of column #1 in Table 2;

[0098] the substitute amino acids listed throughout rows 3-145 of column #12 in Table 2, wherein each substitute amino acid is located at the position that corresponds to the residue number of SEQ ID NO: 3 that is listed in the same row of column #1 in Table 2;

[0099] the substitute amino acids listed throughout rows 3-145 of column #13 in Table 2, wherein each substitute amino acid is located at the position that corresponds to the residue number of SEQ ID NO: 3 that is listed in the same row of column #1 in Table 2;

[0100] the substitute amino acids listed throughout rows 3-145 of column #14 in Table 2, wherein each substitute amino acid is located at the position that corresponds to the residue number of SEQ ID NO: 3 that is listed in the same row of column #1 in Table 2;

[0101] the substitute amino acids listed throughout rows 3-145 of column #15 in Table 2, wherein each substitute amino acid is located at the position that corresponds to the residue number of SEQ ID NO: 3 that is listed in the same row of column #1 in Table 2;

[0102] the substitute amino acids listed throughout rows 3-145 of column #16 in Table 2, wherein each substitute amino acid is located at the position that corresponds to the residue number of SEQ ID NO: 3 that is listed in the same row of column #1 in Table 2;

[0103] the substitute amino acids listed throughout rows 3-145 of column #17 in Table 2, wherein each substitute amino acid is located at the position that corresponds to the residue number of SEQ ID NO: 3 that is listed in the same row of column #1 in Table 2; or

[0104] the substitute amino acids listed throughout rows 3-145 of column #18 in Table 2, wherein each substitute amino acid is located at the position that corresponds to the residue number of SEQ ID NO: 3 that is listed in the same row of column #1 in Table 2.

[0105] 4. The betacoronavirus Spike (S) protein, or fragment thereof, of embodiment 3 comprising:

[0106] an amino acid sequence that has the substitutions of (k) and has at least 80% sequence identity to the entire sequence SEQ ID NO: 15,

[0107] an amino acid sequence that has the substitutions of (l) and has at least 80% sequence identity to the entire sequence SEQ ID NO: 16,

[0108] an amino acid sequence that has the substitutions of (m) and has at least 80% sequence identity to the entire sequence SEQ ID NO: 17,

[0109] an amino acid sequence that has the substitutions of (n) and has at least 80% sequence identity to the entire sequence SEQ ID NO: 18,

[0110] an amino acid sequence that has the substitutions of (o) and has at least 80% sequence identity to the entire sequence SEQ ID NO: 19,

[0111] an amino acid sequence that has the substitutions of (p) and has at least 80% sequence identity to the entire sequence SEQ ID NO: 20,

[0112] an amino acid sequence that has the substitutions of (q) and has at least 80% sequence identity to the entire sequence SEQ ID NO: 21,

[0113] an amino acid sequence that has the substitutions of (r) and has at least 80% sequence identity to the entire sequence SEQ ID NO: 22,

[0114] an amino acid sequence that has the substitutions of (s) and has at least 80% sequence identity to the entire sequence SEQ ID NO: 23,

[0115] an amino acid sequence that has the substitutions of (t) and has at least 80% sequence identity to the entire sequence SEQ ID NO: 24,

[0116] an amino acid sequence that has the substitutions of (u) and has at least 80% sequence identity to the entire sequence SEQ ID NO: 25,

[0117] an amino acid sequence that has the substitutions of (v) and has at least 80% sequence identity to the entire sequence SEQ ID NO: 26,

[0118] an amino acid sequence that has the substitutions of (w) and has at least 80% sequence identity to the entire sequence SEQ ID NO: 27,

[0119] an amino acid sequence that has the substitutions of (x) and has at least 80% sequence identity to the entire sequence SEQ ID NO: 28, or

[0120] an amino acid sequence that has the substitutions of (y) and has at least 80% sequence identity to the entire sequence SEQ ID NO: 29.

[0121] 5. A betacoronavirus Spike (S) protein, or fragment thereof, comprising an amino acid sequence that has amino acid substitutions, wherein said amino acid substitutions are selected from:

[0122] the substitute amino acids listed throughout rows 3-34 of column #4 in Table 3, wherein each substitute amino acid is located at the position that corresponds to the residue number of SEQ ID NO: 3 that is listed in the same row of column #1 in Table 3;

[0123] the substitute amino acids listed throughout rows 3-34 of column #5 in Table 3, wherein each substitute amino acid is located at the position that corresponds to the residue number of SEQ ID NO: 3 that is listed in the same row of column #1 in Table 3;

[0124] the substitute amino acids listed throughout rows 3-34 of column #6 in Table 3, wherein each substitute amino acid is located at the position that corresponds to the residue number of SEQ ID NO: 3 that is listed in the same row of column #1 in Table 3;

[0125] the substitute amino acids listed throughout rows 3-34 of column #7 in Table 3, wherein each substitute amino acid is located at the position that corresponds to the residue number of SEQ ID NO: 3 that is listed in the same row of column #1 in Table 3; or

[0126] the substitute amino acids listed throughout rows 3-34 of column #8 in Table 3, wherein each substitute amino acid is located at the position that corresponds to the residue number of SEQ ID NO: 3 that is listed in the same row of column #1 in Table 3.

[0127] 6. The betacoronavirus Spike (S) protein, or fragment thereof, of embodiment 5 comprising:

[0128] an amino acid sequence that has the substitutions of (I) and has at least 80% sequence identity to the entire sequence SEQ ID NO: 30,

[0129] an amino acid sequence that has the substitutions of (II) and has at least 80% sequence identity to the entire sequence SEQ ID NO: 31,

[0130] an amino acid sequence that has the substitutions of (III) and has at least 80% sequence identity to the entire sequence SEQ ID NO: 32,

[0131] an amino acid sequence that has the substitutions of (IV) and has at least 80% sequence identity to the entire sequence SEQ ID NO: 33, or

[0132] an amino acid sequence that has the substitutions of (V) and has at least 80% sequence identity to the entire sequence SEQ ID NO: 34.

[0133] 7. A betacoronavirus Spike (S) protein, or fragment thereof, comprising an amino acid sequence that has amino acid substitutions, wherein said amino acid substitutions are selected from:

[0134] (A)

[0135] Glycine (G) at the position that corresponds to residue 588 of the sequence SEQ ID NO: 3,

[0136] G at the position that corresponds to residue 656 of the sequence SEQ ID NO: 3, Serine (S) at the position that corresponds to residue 657 of the sequence SEQ ID NO: 3,

[0137] S at the position that corresponds to residue 659 of the sequence SEQ ID NO: 3, Proline (P) at the position that corresponds to residue 960 of the sequence SEQ ID NO: 3,

[0138] P at the position that corresponds to residue 961 of the sequence SEQ ID NO: 3, and one of (i)-(x):

[0139] (i) Cysteines at the positions that correspond to residues 744 and 989 of the sequence SEQ ID NO: 3,

[0140] (ii) Cysteines at the positions that correspond to residues 813 and 836 of the sequence SEQ ID NO: 3,

[0141] (iii) Cysteines at the positions that correspond to residues 544 and 941 of the sequence SEQ ID NO: 3,

[0142] (iv) Cysteines at the positions that correspond to residues 824 and 560 of the sequence SEQ ID NO: 3,

[0143] (v) Cysteines at the positions that correspond to residues 387 and 961 of the sequence SEQ ID NO: 3,

[0144] (vi) Cysteines at the positions that correspond to residues 357 and 959 of the sequence SEQ ID NO: 3,

[0145] (vii) Cysteines at the positions that correspond to residues 356 and 957 of the sequence SEQ ID NO: 3,

[0146] (viii) Cysteines at the positions that correspond to residues 15 and 494 of the sequence SEQ ID NO: 3,

[0147] (ix) Cysteines at the positions that correspond to residues 496 and 518 of the sequence SEQ ID NO: 3,

[0148] (x) Cysteines at the positions that correspond to residues 495 and 538 of the sequence SEQ ID NO: 3;

[0149] (B) the substitute amino acids listed throughout rows 3-134 of column #4 in Table 1, wherein each substitute amino acid is located at the position that corresponds to the residue number of SEQ ID NO: 3 that is listed in the same row of column #1 in Table 1, and one of (i)-(iv):

[0150] (i) Cysteines at the positions that correspond to residues 744 and 989 of the sequence SEQ ID NO: 3,

[0151] (ii) Cysteines at the positions that correspond to residues 813 and 836 of the sequence SEQ ID NO: 3,

[0152] (iii) Cysteines at the positions that correspond to residues 544 and 941 of the sequence SEQ ID NO: 3,

[0153] (iv) Cysteines at the positions that correspond to residues 824 and 560 of the sequence SEQ ID NO: 3;

[0154] (C) the substitute amino acids listed throughout rows 3-134 of column #9 in Table 1, wherein each substitute amino acid is located at the position that corresponds to the residue number of SEQ ID NO: 3 that is listed in the same row of column #1 in Table 1, and one of (i)-(iv):

[0155] (i) Cysteines at the positions that correspond to residues 744 and 989 of the sequence SEQ ID NO: 3,

[0156] (ii) Cysteines at the positions that correspond to residues 813 and 836 of the sequence SEQ ID NO: 3,

[0157] (iii) Cysteines at the positions that correspond to residues 544 and 941 of the sequence SEQ ID NO: 3,

[0158] (iv) Cysteines at the positions that correspond to residues 824 and 560 of the sequence SEQ ID NO: 3;

[0159] (D) the substitute amino acids listed throughout rows 3-145 of column #13 in Table 2, wherein each substitute amino acid is located at the position that corresponds to the residue number of SEQ ID NO: 3 that is listed in the same row of column #1 in Table 2, and one of (i)-(iv):

[0160] (i) Cysteines at the positions that correspond to residues 744 and 989 of the sequence SEQ ID NO: 3,

[0161] (ii) Cysteines at the positions that correspond to residues 813 and 836 of the sequence SEQ ID NO: 3,

[0162] (iii) Cysteines at the positions that correspond to residues 544 and 941 of the sequence SEQ ID NO: 3,

[0163] (iv) Cysteines at the positions that correspond to residues 824 and 560 of the sequence SEQ ID NO: 3;

[0164] (E) the substitute amino acids listed throughout rows 3-145 of column #18 in Table 2, wherein each substitute amino acid is located at the position that corresponds to the residue number of SEQ ID NO: 3 that is listed in the same row of column #1 in Table 2, and one of (i)-(iv):

[0165] (i) Cysteines at the positions that correspond to residues 744 and 989 of the sequence SEQ ID NO: 3,

[0166] (ii) Cysteines at the positions that correspond to residues 813 and 836 of the sequence SEQ ID NO: 3,

[0167] (iii) Cysteines at the positions that correspond to residues 544 and 941 of the sequence SEQ ID NO: 3,

[0168] (iv) Cysteines at the positions that correspond to residues 824 and 560 of the sequence SEQ ID NO: 3;

[0169] (F) the substitute amino acids listed throughout rows 3-34 of column #4 in Table 3, wherein each substitute amino acid is located at the position that corresponds to the residue number of SEQ ID NO: 3 that is listed in the same row of column #1 in Table 3, and one of (i)-(iv):

[0170] (i) Cysteines at the positions that correspond to residues 744 and 989 of the sequence SEQ ID NO: 3,

[0171] (ii) Cysteines at the positions that correspond to residues 813 and 836 of the sequence SEQ ID NO: 3,

[0172] (iii) Cysteines at the positions that correspond to residues 544 and 941 of the sequence SEQ ID NO: 3,

[0173] (iv) Cysteines at the positions that correspond to residues 824 and 560 of the sequence SEQ ID NO: 3.

[0174] 8. The betacoronavirus Spike (S) protein, or fragment thereof, of embodiment 7 comprising:

[0175] an amino acid sequence that has the substitutions of (A)(i) and has at least 80% sequence identity to the entire sequence SEQ ID NO: 35,

[0176] an amino acid sequence that has the substitutions of (A)(ii) and has at least 80% sequence identity to the entire sequence SEQ ID NO: 36,

[0177] an amino acid sequence that has the substitutions of (A)(iii) and has at least 80% sequence identity to the entire sequence SEQ ID NO: 37,

[0178] an amino acid sequence that has the substitutions of (A)(iv) and has at least 80% sequence identity to the entire sequence SEQ ID NO: 38,

[0179] an amino acid sequence that has the substitutions of (A)(v) and has at least 80% sequence identity to the entire sequence SEQ ID NO: 39,

[0180] an amino acid sequence that has the substitutions of (A)(vi) and has at least 80% sequence identity to the entire sequence SEQ ID NO: 40,

[0181] an amino acid sequence that has the substitutions of (A)(vii) and has at least 80% sequence identity to the entire sequence SEQ ID NO: 41,

[0182] an amino acid sequence that has the substitutions of (A)(viii) and has at least 80% sequence identity to the entire sequence SEQ ID NO: 42,

[0183] an amino acid sequence that has the substitutions of (A)(ix) and has at least 80% sequence identity to the entire sequence SEQ ID NO: 43,

[0184] an amino acid sequence that has the substitutions of (A)(x) and has at least 80% sequence identity to the entire sequence SEQ ID NO: 44,

[0185] an amino acid sequence that has the substitutions of (B)(i) and has at least 80% sequence identity to the entire sequence SEQ ID NO: 45,

[0186] an amino acid sequence that has the substitutions of (B)(ii) and has at least 80% sequence identity to the entire sequence SEQ ID NO: 50,

[0187] an amino acid sequence that has the substitutions of (B)(iii) and has at least 80% sequence identity to the entire sequence SEQ ID NO: 55,

[0188] an amino acid sequence that has the substitutions of (B)(iv) and has at least 80% sequence identity to the entire sequence SEQ ID NO: 60,

[0189] an amino acid sequence that has the substitutions of (C)(i) and has at least 80% sequence identity to the entire sequence SEQ ID NO: 46,

[0190] an amino acid sequence that has the substitutions of (C)(ii) and has at least 80% sequence identity to the entire sequence SEQ ID NO: 51,

[0191] an amino acid sequence that has the substitutions of (C)(iii) and has at least 80% sequence identity to the entire sequence SEQ ID NO: 56,

[0192] an amino acid sequence that has the substitutions of (C)(iv) and has at least 80% sequence identity to the entire sequence SEQ ID NO: 61,

[0193] an amino acid sequence that has the substitutions of (D)(i) and has at least 80% sequence identity to the entire sequence SEQ ID NO: 47,

[0194] an amino acid sequence that has the substitutions of (D)(ii) and has at least 80% sequence identity to the entire sequence SEQ ID NO: 52,

[0195] an amino acid sequence that has the substitutions of (D)(iii) and has at least 80% sequence identity to the entire sequence SEQ ID NO: 57,

[0196] an amino acid sequence that has the substitutions of (D)(iv) and has at least 80% sequence identity to the entire sequence SEQ ID NO: 62,

[0197] an amino acid sequence that has the substitutions of (E)(i) and has at least 80% sequence identity to the entire sequence SEQ ID NO: 48,

[0198] an amino acid sequence that has the substitutions of (E)(ii) and has at least 80% sequence identity to the entire sequence SEQ ID NO: 53,

[0199] an amino acid sequence that has the substitutions of (E)(iii) and has at least 80% sequence identity to the entire sequence SEQ ID NO: 58,

[0200] an amino acid sequence that has the substitutions of (E)(iv) and has at least 80% sequence identity to the entire sequence SEQ ID NO: 63,

[0201] an amino acid sequence that has the substitutions of (F)(i) and has at least 80% sequence identity to the entire sequence SEQ ID NO: 49,

[0202] an amino acid sequence that has the substitutions of (F)(ii) and has at least 80% sequence identity to the entire sequence SEQ ID NO: 54,

[0203] an amino acid sequence that has the substitutions of (F)(iii) and has at least 80% sequence identity to the entire sequence SEQ ID NO: 59, or

[0204] an amino acid sequence that has the substitutions of (F)(iv) and has at least 80% sequence identity to the entire sequence SEQ ID NO: 64.

[0205] 9. A betacoronavirus Spike (S) protein, or fragment thereof, comprising an amino acid sequence that has amino acid substitutions, wherein said amino acid substitutions are characterized by (A) and one of (i)-(xi):

[0206] (A)

[0207] Glycine (G) at the position that corresponds to residue 588 of the sequence SEQ ID NO: 3,

[0208] G at the position that corresponds to residue 656 of the sequence SEQ ID NO: 3,

[0209] Serine (S) at the position that corresponds to residue 657 of the sequence SEQ ID NO: 3,

[0210] S at the position that corresponds to residue 659 of the sequence SEQ ID NO: 3,

[0211] Proline (P) at the position that corresponds to residue 960 of the sequence SEQ ID NO: 3,

[0212] P at the position that corresponds to residue 961 of the sequence SEQ ID NO: 3,

[0213] (i) F, L, M, W, or Y at the position that corresponds to residue 391 of the sequence SEQ ID NO: 3;

[0214] (ii) A at the position that corresponds to residue 423 of the sequence SEQ ID NO: 3;

[0215] (iii) A at the position that corresponds to residue 427 of the sequence SEQ ID NO: 3;

[0216] (iv) A, H, M, N, or W at the position that corresponds to residue 429 of the sequence SEQ ID NO: 3;

[0217] (v) H, I, W, or Y at the position that corresponds to residue 430 of the sequence SEQ ID NO: 3;

[0218] (vi) W at the position that corresponds to residue 447 of the sequence SEQ ID NO: 3;

[0219] (vii) M at the position that corresponds to residue 449 of the sequence SEQ ID NO: 3;

[0220] (viii) T at the position that corresponds to residue 450 of the sequence SEQ ID NO: 3;

[0221] (ix) H, I, L, M, N, P, T, W, or Y at the position that corresponds to residue 460 of the sequence SEQ ID NO: 3;

[0222] (x) F, L, M, or Q at the position that corresponds to residue 461 of the sequence SEQ ID NO: 3; or

[0223] (xi) A, Y, F, R, M, C, G, or V at the position that corresponds to residue 467 of the sequence SEQ ID NO: 3.

[0224] 10. The betacoronavirus Spike (S) protein, or fragment thereof, of embodiment 9 comprising an amino acid sequence that has at least 80% sequence identity to the entire sequence of one or more of SEQ ID NOs: 65-104. A betacoronavirus Spike (S) protein, or fragment thereof, comprising an amino acid sequence that has amino acid substitutions, wherein said amino acid substitutions are characterized by (A) and one of (i)-(x):(A)

[0225] Glycine (G) at the position that corresponds to residue 588 of the sequence SEQ ID NO: 3,

[0226] G at the position that corresponds to residue 656 of the sequence SEQ ID NO: 3,

[0227] Serine (S) at the position that corresponds to residue 657 of the sequence SEQ ID NO: 3,

[0228] S at the position that corresponds to residue 659 of the sequence SEQ ID NO: 3,

[0229] Proline (P) at the position that corresponds to residue 960 of the sequence SEQ ID NO: 3,

[0230] P at the position that corresponds to residue 961 of the sequence SEQ ID NO: 3,

[0231] (i) N at the position that corresponds to residue 391 of the sequence SEQ ID NO: 3 and T at the position that corresponds to residue 393 of the sequence SEQ ID NO: 3;

[0232] (ii) N at the position that corresponds to residue 423 of the sequence SEQ ID NO: 3 and T at the position that corresponds to residue 425 of the sequence SEQ ID NO: 3;

[0233] (iii) N at the position that corresponds to residue 427 of the sequence SEQ ID NO: 3 and T at the position that corresponds to residue 429 of the sequence SEQ ID NO: 3;

[0234] (iv) N at the position that corresponds to residue 429 of the sequence SEQ ID NO: 3 and T at the position that corresponds to residue 431 of the sequence SEQ ID NO: 3;

[0235] (v) N at the position that corresponds to residue 430 of the sequence SEQ ID NO: 3 and T at the position that corresponds to residue 432 of the sequence SEQ ID NO: 3;

[0236] (vi) N at the position that corresponds to residue 447 of the sequence SEQ ID NO: 3 and T at the position that corresponds to residue 449 of the sequence SEQ ID NO: 3;

[0237] (vii) N at the position that corresponds to residue 449 of the sequence SEQ ID NO: 3 and T at the position that corresponds to residue 451 of the sequence SEQ ID NO: 3;

[0238] (viii) N at the position that corresponds to residue 450 of the sequence SEQ ID NO: 3;

[0239] (ix) T at the position that corresponds to residue 463 of the sequence SEQ ID NO: 3; or

[0240] (x) N at the position that corresponds to residue 467 of the sequence SEQ ID NO: 3 and T at the position that corresponds to residue 469 of the sequence SEQ ID NO: 3.

[0241] 12. The betacoronavirus Spike (S) protein, or fragment thereof, of embodiment 11 comprising:

[0242] an amino acid sequence that has the substitutions of (A)(i) and has at least 80% sequence identity to the entire sequence SEQ ID NO: 105,

[0243] an amino acid sequence that has the substitutions of (A)(ii) and has at least 80% sequence identity to the entire sequence SEQ ID NO: 106,

[0244] an amino acid sequence that has the substitutions of (A)(iii) and has at least 80% sequence identity to the entire sequence SEQ ID NO: 107,

[0245] an amino acid sequence that has the substitutions of (A)(iv) and has at least 80% sequence identity to the entire sequence SEQ ID NO: 108,

[0246] an amino acid sequence that has the substitutions of (A)(v) and has at least 80% sequence identity to the entire sequence SEQ ID NO: 109,

[0247] an amino acid sequence that has the substitutions of (A)(vi) and has at least 80% sequence identity to the entire sequence SEQ ID NO: 110,

[0248] an amino acid sequence that has the substitutions of (A)(vii) and has at least 80% sequence identity to the entire sequence SEQ ID NO: 111,

[0249] an amino acid sequence that has the substitutions of (A)(viii) and has at least 80% sequence identity to the entire sequence SEQ ID NO: 112,

[0250] an amino acid sequence that has the substitutions of (A)(ix) and has at least 80% sequence identity to the entire sequence SEQ ID NO: 113, or

[0251] an amino acid sequence that has the substitutions of (A)(x) and has at least 80% sequence identity to the entire sequence SEQ ID NO: 114.

[0252] 13. The betacoronavirus S protein, or S protein fragment, of any one of embodiments 1-12 comprising an amino acid sequence with at least 80% sequence identity to the entire sequence of one or more of SEQ ID NOs: 5-114.

[0253] 14. A betacoronavirus Spike (S) protein, or fragment thereof, of embodiment 1, which comprises one of the following SEQ ID NOs: 22-29.

[0254] 15. A nucleic acid molecule comprising a polynucleotide sequence that encodes the betacoronavirus S protein, or S protein fragment, of any one of embodiments 1-14.

[0255] 16. The nucleic acid molecule of embodiment 15 that is a Self-Amplifying RNA Molecule comprising, from 5′-3′, a polynucleotide comprising the sequence SEQ ID NO: 119; a polynucleotide sequence that encodes the betacoronavirus S protein, or S protein fragment, of any one of embodiments 1-13; and a polynucleotide comprising the sequence SEQ ID NO: 120.

[0256] 17. A betacoronavirus Spike (S) protein, or fragment thereof, comprising an amino acid sequence that has amino acid substitutions, wherein said amino acid substitutions are characterized by (A) and one of (i)-(v):

[0257] (A)
[0258] G at the position that corresponds to residue 202 of any of SEQ ID NOS: 125-134;
[0259] Asparagine (N) at the position that corresponds to residue 404 of any of SEQ ID NOS: 125-134;
[0260] Lysine (K) at the position that corresponds to residue 471 of any of SEQ ID NOS: 125-134;
[0261] Tyrosine (Y) at the position that corresponds to residue 488 of any of SEQ ID NOS: 125-134;
[0262] G at the position that corresponds to residue 601 of any of SEQ ID NOS: 125-134; and
[0263] Isoleucine (I) at the position that corresponds to residue 692 and Glutamine (Q) that corresponds to residue 727 of any of SEQ ID NOS: 125-134;

[0264] (i) P at the positions that correspond to residues 691, 693, 818, and 1101 of any of SEQ ID NOS: 125-134;

[0265] (ii) Glutamate (E) at the position that corresponds to residue 756 of any of SEQ ID NOS: 125-134;

[0266] (iii) Y at the position that corresponds to residue 801 of any of SEQ ID NOS:125-134;

[0267] (iv) Serine (S) at the position that corresponds to residue 879 of any of SEQ ID NOS:125-134; and

[0268] (v) K at the position that corresponds to residue 916 of any of SEQ ID NOS: 125-134.

[0269] 18. The betacoronavirus Spike (S) protein, or fragment thereof, of embodiment 17 comprising:
[0270] an amino acid sequence that has the substitutions of (A)(i) and has at least 80% sequence identity to the entire sequence SEQ ID NO: 125;
[0271] an amino acid sequence that has the substitutions of (A)(i) and has at least 80% sequence identity to the entire sequence SEQ ID NO: 126;
[0272] an amino acid sequence that has the substitutions of (A)(i) and has at least 80% sequence identity to the entire sequence SEQ ID NO: 127;
[0273] an amino acid sequence that has the substitutions of (A)(i) and has at least 80% sequence identity to the entire sequence SEQ ID NO: 128; and
[0274] an amino acid sequence that has the substitutions of (A)(i) and has at least 80% sequence identity to the entire sequence SEQ ID NO: 129.

[0275] 19. The betacoronavirus Spike (S) protein, or fragment thereof, of embodiment 18, comprising an amino acid sequence of any one of SEQ ID NOs: 125-129.

[0276] 20. A betacoronavirus Spike (S) protein, or fragment thereof, comprising an amino acid sequence that has amino acid substitutions, wherein said amino acid substitutions are characterized by (A) and one of (i)-(v):

[0277] (A)
[0278] G at the position that corresponds to residue 202 of any of SEQ ID NOS: 125-134;
[0279] Asparagine (N) at the position that corresponds to residue 404 of any of SEQ ID NOS: 125-134;
[0280] Lysine (K) at the position that corresponds to residue 471 of any of SEQ ID NOS: 125-134;
[0281] Tyrosine (Y) at the position that corresponds to residue 488 of any of SEQ ID NOS: 125-134;
[0282] G at the position that corresponds to residue 601 of any of SEQ ID NOS: 125-134; and
[0283] Isoleucine (I) at the position that corresponds to residue 692 and Glutamine (Q) that corresponds to residue 727 of any of SEQ ID NOS: 125-134;

[0284] (i) S at the position that corresponds to residue 691 of any of SEQ ID NOS:125-134;

[0285] (ii) A at the positions that correspond to residues 693 and 818 of any of SEQ ID NOS: 125-134;

[0286] (iii) I at the position that corresponds to residue 1101 of any of SEQ ID NOS: 125-134;

[0287] (iv) G at the position that corresponds to residue 756 of any of SEQ ID NOS: 125-134;

[0288] (v) K at the position that corresponds to residue 801 of any of SEQ ID NOS:125-134;

[0289] (iv) A at the position that corresponds to residue 879 of any of SEQ ID NOS:125-134; and

[0290] (v) S at the position that corresponds to residue 916 of any of SEQ ID NOS:125-134.

[0291] 21. The betacoronavirus Spike (S) protein, or fragment thereof, of embodiment 20 comprising:
[0292] an amino acid sequence that has the substitutions of (A)(i) and has at least 80% sequence identity to the entire sequence SEQ ID NO: 130;
[0293] an amino acid sequence that has the substitutions of (A)(i) and has at least 80% sequence identity to the entire sequence SEQ ID NO: 131;
[0294] an amino acid sequence that has the substitutions of (A)(i) and has at least 80% sequence identity to the entire sequence SEQ ID NO: 132;
[0295] an amino acid sequence that has the substitutions of (A)(i) and has at least 80% sequence identity to the entire sequence SEQ ID NO: 133; and
[0296] an amino acid sequence that has the substitutions of (A)(i) and has at least 80% sequence identity to the entire sequence SEQ ID NO: 134.

[0297] 22. The betacoronavirus Spike (S) protein, or fragment thereof, of embodiment 21, comprising an amino acid sequence of any one of SEQ ID NOs: 130-134.

[0298] 23. A nucleic acid molecule comprising a polynucleotide sequence that encodes the betacoronavirus S protein, or S protein fragment, of embodiment 17 or 20.

[0299] 24. The nucleic acid molecule of embodiment 23 that is a Self-Amplifying RNA Molecule comprising, from 5′-3′, a polynucleotide comprising the sequence SEQ ID NO: 119; a polynucleotide sequence that encodes the betacoronavirus S protein, or S protein fragment, of embodiment 17 or 20; and a polynucleotide comprising the sequence SEQ ID NO: 120.

[0300] 25. An immunogenic composition comprising (i) the betacoronavirus S protein, or S protein fragment of any one of embodiments 1-14, 17 or 20, optionally further comprising an adjuvant; or (ii) the nucleic acid molecule of embodiment 15 or 16.

[0301] 26. A method of inducing an immune response against betacoronavirus; inducing neutralizing antibodies against betacoronavirus; reducing cell entry by betacoronavirus; reducing cell-to-cell spread of betacoronavirus; reducing betacoronavirus entry into cells; or preventing, or reducing the severity of, betacoronavirus-associated diseases; comprising

[0302] delivering to a subject an immunologically effective amount of the immunogenic composition of embodiment 25.

[0303] 27. Use of the immunogenic composition of embodiment 25 for inducing an immune response against betacoronavirus; inducing neutralizing antibodies against betacoronavirus; reducing cell entry by betacoronavirus; reducing cell-to-cell spread of betacoronavirus; reducing betacoronavirus entry into cells; or preventing, or reducing the severity of, betacoronavirus-associated diseases.

[0304] 28. Use of the immunogenic composition of embodiment 25 for the manufacture of a medicament for inducing an immune response against betacoronavirus; inducing neutralizing antibodies against betacoronavirus; reducing cell entry by betacoronavirus; reducing cell-to-cell spread of betacoronavirus; reducing betacoronavirus entry into cells; or preventing, or reducing the severity of, betacoronavirus-associated diseases.

[0305] 29. The immunogenic composition of embodiment 25 for use in inducing an immune response against betacoronavirus; inducing neutralizing antibodies against betacoronavirus; reducing cell entry by betacoronavirus; reducing cell-to-cell spread of betacoronavirus; reducing betacoronavirus entry into cells; or preventing, or reducing the severity of, betacoronavirus-associated diseases.

### BRIEF DESCRIPTION OF THE DRAWINGS

[0306] FIG. 1A—Schematic of the SARS-CoV-2 Spike (S) protein primary structure by domain (from Wrapp et al. 2020 Science 367(6483):1260-1263). SS, signal sequence; S2′, S2′ protease cleavage site; FP, fusion peptide; HR1, heptad repeat 1; CH, central helix; CD, connector domain; HR2, heptad repeat 2; TM, transmembrane domain; CT, cytoplasmic tail. Arrows denote protease cleavage sites.

[0307] FIG. 1B—Schematic diagram of the MERS-CoV Spike (S) glycoprotein organization (from Yuan et al. 2017 Nat. Comm. 8(15092), 9 pgs). NTD, N-terminal domain; L, linker region; RBD, receptor-binding domain; SD, subdomain; UH, upstream helix; FP, fusion peptide; CR, connecting region; HR, heptad repeat; CH, central helix; BH, b-hairpin; TM, transmembrane region/domain; CT, cytoplasmic tail.

[0308] FIG. 1C—Schematic diagram of the SARS-CoV-1 Spike (S) glycoprotein organization (from Yuan et al. 2017 Nat. Comm. 8(15092), 9 pgs). The abbreviations of elements are the same as in FIG. 1B.

[0309] FIGS. 1D and 1E—Schematic diagram of the SARS-CoV-2 ectodomain of assay control proteins, S-2P (FIG. 1D, with 2 proline substitutions) and HexaPro (FIG. 1E, with 6 proline substitutions).

[0310] FIG. 2—Rosetta Energies (kcal/mol) of modified SARS-CoV-2 Spike (S) proteins designed to include stabilizing mutations (relative to PDB Accession Number 6VYB) that target sites on the S2 (circles) or S (squares) domains, on a model of the full S antigen (hexagon, “6VYB” meaning the sequence published as PDB Accession Number 6VYB).

[0311] FIG. 3—Rosetta Energies (kcal/mol) of modified SARS-CoV-2 Spike (S) proteins designed to include stabilizing point mutations in the S domain (S, squares), S2 and N-terminal domains (S2_NTD, diamonds) or S2 domain only (S2, circles) compared to a prefusion SARS-CoV-2 S protein having the sequence SEQ ID NO: 4 (“preS”, hexagon) which was produced according to Wrapp et al. 2020 Science 367(6483):1260-1263, with the D614G drift mutation as identified by internal phylogenetic analysis and by Korber et al. 2020 bioRxiv (HyperTextTransferProtocolSecure: //doi.org/10.1101/2020.04.29.069054) and Brufsky 20 Apr. 2020 J Med Virol, 7 pages, doi: 10.1002/jmv.25902.

[0312] FIGS. 4A and 4B—Rosetta Energies (kcal/mol) results from a combined Rosetta HBNet-PROSS workflow targeting the S or S2 domains from SARS-CoV-2 S protein, on a model of the full S protein (preS_6VYB). The design protocol performs hydrogen-bond network optimization, plus combinatorial sequence design based on evolutionary sequences obtained from the non-redundant BLAST database. The combined protocol indicates that HBNet-PROSS (S_hbnet_pross, circles) is destabilizing for the HBNet design (S_hbnet, squares) of the full S protein (preS_6VYB, hexagon) (FIG. 4A) and stabilizing for the HBNet design targeted towards the S2 domain (S2 hbnet_pross, circles), which contains the core virus fusion machinery and is mostly helical in nature, versus the HBNet design (S2_hbnet, squares) (FIG. 4B).

[0313] FIG. 5—Rosetta Energies (kcal/mol) results from a single point mutation design to knock-out binding at the interface between hACE2 and SARS CoV-2 S protein RBD (using interface residues shown by the x-ray structure of Lan et al. (2020 Nature HyperTextTransferProtocolSecure://doi.org/10.1038/s41586-020-2180-5, 16 pgs), revealing some mutations that reduce binding affinity (greater than 2 kcal/mol) while maintaining folding stability, according to in silico Rosetta energetics.

[0314] FIG. 6—Rosetta Energy (kcal/mol) results of introducing NxT glycan motifs through in silico mutation design to mask the binding site at the interface between hACE2 and SARS CoV-2 S protein RBD (using interface residues shown by the x-ray structure of Lan et al. (2020 Nature HyperTextTransferProtocolSecure: //doi.org/10.1038/s41586-020-2180-5, 16 pgs). These results show that the motifs have varying clusters of stabilization energies, indicating that substitutions at A475 and K417 might maintain folding stability equivalent to the wildtype.

[0315] FIGS. 7A and 7B—The designed S antigens were produced in a high-throughput expression system, identifying constructs with >5 or 6-fold protein yield, relative to S-2P. HexaPro 1 and HexaPro 2 have the same chemical and physical properties as HexaPro, differing only by the technician who handled the control S protein. S-2P 1 and S-2P 2 have the same chemical and physical properties as S-2P, differing only by the technician who handled the control S protein.

[0316] FIG. 8A-8D In a HT binding screen in supernatant (Octet BLI), the ACE2 receptor and 3 antibodies (CR3022: RBD Specific Antibody, VRC 118: NTD Specific Antibody, VRC 112: S2 Specific Antibody) were used to test the conformational and antigenic integrity of the designs. VRC112 and VRC118 were obtained under an agreement with National Institute of Allergy and Infectious Diseases (NIAID).

[0317] FIG. 8E—Binding Affinity assay, performed using SPR, shows reduced binding affinity of SEQ ID NO: 25 to CR3022 IgG and ACE2 receptor.

[0318] FIGS. 9A-9C—Thermal unfolding of the S antigens was screened (Nano DSF), indicating that some constructs had increased stability depending on mutation site.

[0319] FIG. 10—PROSS designs of CoV-2 variant B.1.351 spike glycoprotein, introducing mutations into S2 domain (black) or buried residue with less than 25% exposure in the S2 domain (gray).

### DETAILED DESCRIPTION

### Terms

[0320] Unless otherwise explained, all technical and scientific terms used herein have the same meaning as commonly understood by one of ordinary skill in the art to which this disclosure belongs. Definitions of common terms in molecular biology can be found in Benjamin Lewin, Genes V, published by Oxford University Press, 1994 (ISBN 0-19-854287-9); Kendrew et al. (eds.), The Encyclopedia of Molecular Biology, published by Blackwell Science Ltd., 1994 (ISBN 0-632-02182-9); and Robert A. Meyers (ed.), Molecular Biology and Biotechnology: a Comprehensive Desk Reference, published by VCH Publishers, Inc., 1995 (ISBN 1-56081-569-8).

[0321] “About” or “approximately”, when used to modify a numeric value, means a number that is not statistically different from the referenced numeric value and, when the numeric value relates to the amount of a composition component, means a number not more than 10% below or above the numeric value (not more than 10% below or above the endpoint values if the numeric value is a range). As an example, a composition comprising “about 25 μg” of component A means the composition comprises “22.5-27.5 μg” of component A (10% of 25 is 2.5, so 10% below 25 is 22.5 and 10% above 25 is 27.5; resulting in the range 22.5-27.5). As an example, a composition comprising “approximately 25 μg” of component A means the composition comprises “22.5-27.5 μg” of component A. As a further example, a composition comprising “about 25-30 μg” of component A means the composition comprises “22.5-33 μg” of component A (10% below 25 is 22.5 and 10% above 30 is 33). As a further example, a composition comprising “approximately 25-30 μg” of component A means the composition comprises “22.5-33 μg” of component A.

[0322] “Adjuvant” means an agent that, or composition comprising an agent, that modulates an immune response in a non-specific manner and accelerates, prolongs, and/or enhances the immune response to an antigen. Such an agent may be an “immunostimulant”. An “adjuvant” herein may be a composition that comprises one or more immunostimulants (in particular, an immunostimulating effective amount of one or more immunostimulants (e.g., a saponin)). A “pharmaceutical-grade adjuvant” means an adjuvant suitable for pharmaceutical use (e.g., an adjuvant comprising one or more purified immunostimulant, in particular comprising an immunologically effective amount of a purified immunostimulant). Therefore and for clarity, an adjuvant administered with an antigen produces an accelerated, prolonged, and/or enhanced immune response than the antigen alone does.

[0323] The term “and/or” as used in a phrase such as “A and/or B” is intended to include “A and B,” “A or B,” “A,” and “B.” Likewise, the term “and/or” as used in a phrase such as “A, B, and/or C” is intended to encompass each of the following embodiments: A, B, and C; A, B, or C; A or C; A or B; B or C; A and C; A and B; B and C; A (alone); B (alone); and C (alone). Similarly, the word “or” is intended to include each of the listed elements individually as well as any combination of the elements (i.e., “or” herein encompasses “and”), unless the context clearly indicates otherwise.

[0324] “Antibody” means a protein molecule produced by the immune system to help eliminate an antigen (or recombinant versions thereof) and includes a monoclonal antibody, polyclonal antibody, multispecific antibody (e.g., bispecific antibodies), labelled antibody, or antibody fragment (so long as the fragment exhibits or maintains the desired antigen-binding activity). Unless stated otherwise, by “antibody” herein it is meant a neutralizing antibody. An “antibody fragment” or “antigen-binding fragment” refers to a molecule other than an intact antibody that comprises a portion of an intact antibody that binds the antigen to which the intact antibody binds. Examples of antibody fragments include but are not limited to Fv, Fab, Fab′, Fab′-SH, F(ab′)2; diabodies; linear antibodies; single-chain antibody molecules (e.g. scFv); and multispecific antibodies formed from antibody fragments. Papain digestion of antibodies produces two identical antigen-binding fragments, called “Fab” fragments, each with a single antigen-binding site, and a residual “Fc” fragment, whose name reflects its ability to crystallize readily. Pepsin treatment yields an F(ab′)2 fragment that has two antigen-combining sites and is still capable of cross-linking antigen.

[0325] “Antigen” means a molecule, structure, compound, or substance (e.g., a polynucleotides (DNA, RNA), polypeptides, protein complexes) that can stimulate an immune response by producing antigen-specific antibodies and/or an antigen-specific T cell response in a subject (e.g., a human subject). Antigens may be live, inactivated, purified, and/or recombinant. For clarity, an adjuvant is not an antigen at least because an adjuvant cannot (alone) induce antigen-specific immune response. As used herein, an antigen is immunogenic. The term “antigen” includes all related antigenic epitopes. The term “epitope” means that portion of an antigen that determines its immunological specificity and refers to a site on an antigen to which B and/or T cells respond. “Predominant antigenic epitopes” are those epitopes to which a functionally significant host immune response (e.g., an antibody response or a T-cell response) is made. Thus, the predominant antigenic epitopes are those antigenic moieties that, when recognized by the host immune system, result in a protective immune response. The term “T-cell epitope” refers to an epitope that, when bound to an appropriate MHC molecule, is specifically bound by a T cell (via a T cell receptor). A “B-cell epitope” is an epitope that is specifically bound by an antibody (or B cell receptor molecule).

[0326] “Antigenicity” means a molecule's, structure's, compound's, or substance's (e.g., an antigen's) ability to combine with an antibody. An “increased antigenicity” or “enhanced antigenicity” means an increased binding affinity of an antibody to the molecule, structure, compound, or substance (e.g., an antigen). An increased binding affinity may be provided as a decreased dissociation constant (K_{d}) value (in nM). See generally, e.g., Ma et al. 2011 PLoS Path. 7(9), e1002200. For clarity, antigenicity does not mean immunogenicity—a molecule may bind an antibody (antigenicity) without eliciting an immune response (immunogenicity).

[0327] “Comparably to” or “comparable to” means equivalent, analogous, substitutes, not statistically different than, not materially different in structure and/or function. For example, recombinant molecule or recombinant structure said to be “comparable to wild type” or “comparable to its wild type counterpart” or an “analog” means the recombinant molecule/structure may be substituted for its wild type counterpart without material change to or effect (e.g., in eliciting an immunogenic response). An “analog” herein includes synthetic molecules or structures meant to mimic the function of its counterpart (in that way, an analog's structure may be distinct from its counterpart's but the analog's function or effect is comparable to its counterpart's function or effect).

[0328] “Corresponding to” or “corresponds to” (as in, e.g., “at the position location that corresponds to residue # within sequence Y”) is used to reference a nucleic acid or amino acid residue of a second sequence (e.g., a subject sequence) that “aligns to” a referenced residue (structure and/or location) of a first (e.g., query sequence) (e.g., by pairwise, global sequence alignment). This terminology is used to accommodate the well-recognized fact that structural variation that may exist between functionally comparable sequences. Due to sequence variation (e.g., natural sequence variation) between the a first (query) sequence and the second (subject) sequences, the subject residue may have an identical structure as the query residue, but be located at a different location and therefore have a different residue number than the query residue when aligned thereto. Also perhaps due to sequence variation (e.g., natural sequence variation), the subject residue may not have an identical structure as the query residue (e.g., may be a so-called conserved substitute) and nonetheless align to the same location (i.e., have the same residue number) as the query residue within the first (query) sequence. “Aligns to” may be used herein as an alternate to “corresponding to”. Whether or not a nucleic/amino acid residue within a subject sequence “corresponds to” a nucleic/amino acid residue within a query sequence is determined by sequence alignment, preferably by pairwise, global alignment with the Needleman-Wunsch algorithm using default parameters (defined elsewhere herein). As an example, “the nucleic amino acid residue corresponding to residue ## of SEQ ID NO: ###” means the nucleic/amino acid that aligns to the referenced residue (“ . . . residue ## of SEQ ID NO: ###”), such as after pairwise, global alignment with the Needleman-Wunsch algorithm using default parameters. This terminology is useful, for example, when the second/subject sequence comprises one or more gap(s), insertions, or deletions as compared to the first/query sequence (thus changing residue numbering). As a further example, “the nucleic amino acid residue at the position corresponding to ‘X’ of SEQ ID NO: ###” or simply “at the position corresponding to ‘X’ of SEQ ID NO: ###” means the nucleic/amino acid (regardless of its chemical structure) that aligns to the referenced location (where “‘X’ of SEQ ID NO: ###” is located), such as after pairwise, global alignment with the Needleman-Wunsch algorithm using default parameters. This is useful, for example, when describing the location of a sequence feature (e.g., where a domain is) or modification (e.g., where to make a nucleic amino acid substitution) amongst sequences of varying lengths. In certain embodiments and for readability, “numbered with respect to”, “numbered according to”, “with respect to”, or similar phrases may be used to reference a residue or sequence feature. As a demonstration, “amino acid corresponding to F17 of the sequence SEQ ID NO: 3” encompasses the amino acid (regardless of its chemical structure) that aligns to F17 of SEQ ID NO: 3 such as F34 of the SARS-CoV-1 spike (S) protein sequence SEQ ID NO: 116. Also, “a serine (S) at a position corresponding to residue 17 of SEQ ID NO: 3” encompasses both the F17S mutant of the SARS-CoV-2 spike (S) protein sequence SEQ ID NO: 3 as well as the F34S mutant of the SARS-CoV-1 S protein sequence SEQ ID NO: 116 (because F17 of SEQ ID NO: 3 aligns to F34 of SEQ ID NO: 116 as shown below). This language is also useful for describing resultant modifications (e.g., amino acid substitutions) when the original residue may be one of several, for example, “an asparagine (N) at a position corresponding to residue 391 of SEQ ID NO: 3” encompasses both the K391N mutant of SARS-CoV-2 S protein sequence SEQ ID NO: 3 as well as the V391N mutant of SARS-CoV-1 S protein sequence SEQ ID NO: 116 (see alignment below). Below is a pairwise, global alignment using Needleman-Wunsch algorithm with default parameters of SARS-CoV-2 Spike (S) protein sequence SEQ ID NO: 3 to SARS-CoV-1 S protein sequence SEQ ID NO: 116—alignment conducted using EMBOSS Needle (pair output format), the reported aligned region is 1265 amino acids in length with 840 identical matches meaning the percent sequence identity calculation is (840/1265)×100 (=66.4%), if rounded down to the nearest whole number provides 66% identity between SEQ ID NOs: 3 and 116; referenced residues/positions are double underlined. Please note that the length of the aligned region (1265 residues) includes any gaps in the length and is, here, neither the length of SEQ ID NO: 3 (1121) nor SEQ ID NO: 116 (1242).

| | | |
|---|---|---|
| # | Aligned_sequences: | 2 |
| # | 1: | SEQ_ID_NO_3 |
| # | 2: | SEQ_ID_NO_116 |
| # | Matrix: | EBLOSUM62 |
| # | Gap_penalty: | 10.0 |
| # | Extend_penalty: | 0.5 |
| # | | |
| # | Length: | 1265 |
| # | Identity: | 840/1265 (66.4%) |
| # | Similarity: | 973/1265 (76.9%) |
| # | Score: | 4523.5 |

| | | | |
|---|---|---|---|
| SEQ_ID_NO_3 | 1 | ------------------AYTNSFTRGVYYPDKVFRSSVLHSTQDLFLPF | 32 |
| | | .:\|:\|. \|\|\|\|\|\|\|::\|\|\|..\|:.\|\|\|\|\|\|\|\| | |
| SEQ_ID_NO_116 | 1 | SDLDRCTTFDDVQAPNYTQHTSSM-RGVYYPDEIFRSDTLYLTQDLFLPF | 49 |
| SEQ_ID_NO_3 | 33 | FSNVTWFHAIHVSGTNGTKRFDNPVLPFNDGVYFASTEKSNIIRGWIFGT | 82 |
| | | :\|\|\|\|.\|\|.\| \|.\| \|.\|\|\|:\|\|.\|\|:\|\|\|:\|\|\|\|\|::\|\|\|:\|\|: | |
| SEQ_ID_NO_116 | 50 | YSNVTGFHTI-----NHT--FGNPVIPFKDGIYFAATEKSNVVRGWVFGS | 92 |
| SEQ_ID_NO_3 | 83 | TLDSKTQSLLIVNNATNVVIKVCEFQFCNDPFLGVYYHKNNKSWMESEFR | 132 |
| | | \|:::\|:\|\|::\|:\|\|:\|\|\|\|\|:.\|.\|:.\|::\|\|..\| :.....::... | |
| SEQ_ID_NO_116 | 93 | TMNNKSQSVIIINNSTNVVIRACNFELCDNPFFAV----SKPMGTQTHTM | 138 |
| SEQ_ID_NO_3 | 133 | VYSSANNCTFEYVSQPFLMDLEGKQGNFKNLREFVFKNIDGYFKIYSKHT | 182 |
| | | ::.:\|.\|\|\|\|\|\|:\|..\|.:\|:..\|.\|\|\|\|:\|\|\|\|\|\|\|\|.\|\|:..:\|..:. | |
| SEQ_ID_NO_116 | 139 | IFDNAFNCTFEYISDAFSLDVSEKSGNFKHLREFVFKNKDGFLYVYKGYQ | 188 |
| SEQ_ID_NO_3 | 183 | PINLVRDLPQGFSALEPLVDLPIGINITRFQTLLALHRSYLTPGDSSSGW | 232 |
| | | \|\|::\|\|\|\|\|.\|\|:.\|:\|:..\|\|:\|\|\|\|\|.\|:.:\| :..:\|.... \| | |
| SEQ_ID_NO_116 | 189 | PIDVVRDLPSGFNTLKPIFKLPLGINITNFRAIL----TAFSPAQDI--W | 232 |
| SEQ_ID_NO_3 | 23 | TAGAAAYYVGYLQPRTFLLKYNENGTITDAVDCALDPLSETKCTLKSFTV | 282 |
| | | ...\|\|\|\|:\|\|\|\|:\|.\|\|:\|\|\|:\|\|\|\|\|\|\|\|\|\|\|:.:\|\|:\|.\|\|::\|\|\|.: | |
| SEQ_ID_NO_116 | 233 | GTSAAAYFVGYLKPTTFMLKYDENGTITDAVDCSQNPLAELKCSVKSFEI | 282 |
| SEQ_ID_NO_3 | 283 | EKGIYQTSNFRVQPTESIVRFPNITNLCPFGEVFNATRFASVYAWNRKRI | 332 |
| | | :\|\|\|\|\|\|\|\|\|\|\|.\|:..:\|\|\|\|\|\|\|\|\|\|\|\|\|\|\|\|\|\|\|:\|.\|\|\|\|\|.\|\|:\| | |
| SEQ_ID_NO_116 | 283 | DKGIYQTSNFRVVPSGDVVRFPNITNLCPFGEVFNATKFPSVYAWERKKI | 332 |
| SEQ_ID_NO_3 | 333 | SNCVADYSVLYNSASFSTFKCYGVSPTKLNDLCFTNVYADSEVIRGDEVR | 382 |
| | | \|\|\|\|\|\|\|\|\|\|\|\|\|..\|\|\|\|\|\|\|\|\|\|.\|\|\|\|\|\|\|\|:\|\|\|\|\|\|\|\|::\|\|:\|\| | |
| SEQ_ID_NO_116 | 333 | SNCVADYSVLYNSTFFSTFKCYGVSATKLNDLCFSNVYADSFVVKGDDVR | 382 |
| SEQ_ID_NO_3 | 383 | QIAPGQTGKIADYNYKLPDDFTGCVIAWNSNNLDSKVGGNYNYLYRLFRK | 432 |
| | | \|\|\|\|\|\|\|\|.\|\|\|\|\|\|\|\|\|\|\|\|.\|\|\|:\|\|\|:.\|:\|:...\|\|\|\|\|.\|\|..\|. | |
| SEQ_ID_NO_116 | 383 | QIAPGQTGVIADYNYKLPDDFMGCVLAWNTRNIDATSTGNYNYKYRYLRH | 432 |
| SEQ_ID_NO_3 | 433 | SNLKPFERDISTEIYQAGSTPCNGVEGFNCYFPLQSYGFQPTNGVGYQPY | 482 |
| | | ..\|:\|\|\|\|\|\|\|...:.....\|\|. ....\|\|\|:\|\|..\|\|\|..\|.\|:\|\|\|\|\| | |
| SEQ_ID_NO_116 | 433 | GKLRPFERDISNVPFSPDGKPCT-PPALNCYWPLNDYGFYTTTGIGYQPY | 481 |
| SEQ_ID_NO_3 | 483 | RVVVLSFELLHAPATVCGPKKSTNLVKNKCVNFNFNGLTGTGVLTESNKK | 532 |
| | | \|\|\|\|\|\|\|\|\|\|:\|\|\|\|\|\|\|\|\|.\|\|:\|:\|\|:\|\|\|\|\|\|\|\|\|\|\|\|\|\|\|\|.\|:\|: | |
| SEQ_ID_NO_116 | 482 | RVVVLSFELLNAPATVCGPKLSTDLIKNQCVNFNFNGLTGTGVLTPSSKR | 531 |
| SEQ_ID_NO_3 | 533 | FLPFQQFGRDIADTTDAVRDPQTLEILDITPCSFGGVSVITPGTNTSNQV | 582 |
| | | \|.\|\|\|\|\|\|\|\|::\|.\|\|:\|\|\|\|:\|.\|\|\|\|\|:\|\|\|\|\|\|\|\|\|\|\|\|\|\|\|.\|::\| | |
| SEQ_ID_NO_116 | 532 | FQPFQQFGRDVSDFTDSVRDPKTSEILDISPCSFGGVSVITPGTNASSEV | 581 |
| SEQ_ID_NO_3 | 583 | AVLYQDVNCTEVPVAIHADQLTPTWRVYSTGSNVFQTRAGCLIGAEHVNN | 632 |
| | | \|\|\|\|\|\|\|\|\|\|:\|..\|\|\|\|\|\|\|\|\|.\|\|:\|\|\|\|:\|\|\|\|\|:\|\|\|\|\|\|\|\|\|\|:. | |
| SEQ_ID_NO_116 | 582 | AVLYQDVNCTDVSTAIEADQLTPAWRIYSTGNNVFQTQAGCLIGAEHVDT | 631 |
| SEQ_ID_NO_3 | 633 | SYECDIPIGAGICASYQTQTNSPRRARSVASQSIIAYTMSLGAENSVAYS | 682 |
| | | \|\|\|\|\|\|\|\|\|\|\|\|\|\|\|\|.\|.: ..\|\|.:.:\|\|:\|\|\|\|\|\|\|\|::\|:\|\|\| | |
| SEQ_ID_NO_116 | 632 | SYECDIPIGAGICASYHTVS----LLRSTSQKSIVAYTMSLGADSSTAYS | 677 |
| SEQ_ID_NO_3 | 683 | NNSIAIPTNFTISVTTEILPVSMTKTSVDCTMYICGDSTECSNLLLQYGS | 732 |
| | | \|\|:\|\|\|\|\|\|\|:\|\|:\|\|\|::\|\|\|\|.\|\|\|\|\|\|.\|\|\|\|\|\|\|\|\|\|:\|\|\|\|\|\|\|\| | |
| SEQ_ID_NO_116 | 678 | NNTIAIPTNFSISITTEVMPVSMAKTSVDCNMYICGDSTECANLLLQYGS | 727 |
| SEQ_ID_NO_3 | 733 | FCTQLNRALTGIAVEQDKNTQEVFAQVKQIYKTPPIKDFGGFNFSQILED | 782 |
| | | \|\|\|\|\|\|\|\|\|:\|\|\|.\|\|\|:\|\|:\|\|\|\|\|\|\|\|:\|\|\|\|.:\|.\|\|\|\|\|\|\|\|\|\|\|\| | |
| SEQ_ID_NO_116 | 728 | FCTQLNRALSGIAAEQDRNTREVFAQVKQMYKTPTLKYFGGFNFSQILPD | 777 |
| SEQ_ID_NO_3 | 783 | PSKPSKKSFLEDLLENKVTLADAGFIKQYGDCLGDLAAKDLICAQRENGL | 832 |
| | | \|.\|\|:\|\|\|\|\|\|\|\|\|\|\|\|\|\|\|\|\|\|\|\|:\|\|\|\|:\|\|\|\|\|.\|\|\|\|\|\|\|\|\|\|\|\|\| | |
| SEQ_ID_NO_116 | 778 | PLKPTKRSFIEDLLFNKVTLADAGEMKQYGECLGDINARDLICAQKFNGL | 827 |
| SEQ_ID_NO_3 | 833 | TVLPPLLTDEMIAQYTSALLAGTITSGWTFGAGAALQIPFAMQMAYRFNG | 882 |
| | | \|\|\|\|\|\|\|\|\|:\|\|\|.\|\|:\|\|::\|\|.\|:\|\|\|\|\|\|\|\|\|\|\|\|\|\|\|\|\|\|\|\|\|\|\|\| | |
| SEQ_ID_NO_116 | 828 | TVLPPLLTDDMIAAYTAALVSGTATAGWTFGAGAALQIPFAMQMAYRFNG | 877 |
| SEQ_ID_NO_3 | 883 | IGVTQNVLYENQKLIANQFNSAIGKIQDSLSSTASALGKLQDVVNQNAQA | 932 |
| | | \|\|\|\|\|\|\|\|\|\|\|\|\|.\|\|\|\|\|\|.\|\|.:\|\|:\|\|::\|::\|\|\|\|\|\|\|\|\|\|\|\|\|\|\| | |
| SEQ_ID_NO_116 | 878 | IGVTQNVLYENQKQIANQFNKAISQIQESLTTTSTALGKLQDVVNQNAQA | 927 |
| SEQ_ID_NO_3 | 933 | LNTLVKQLSSNFGAISSVLNDILSRLDKVEAEVQIDRLITGRLQSLQTYV | 982 |
| | | \|\|\|\|\|\|\|\|\|\|\|\|\|\|\|\|\|\|\|\|\|\|\|\|\|\|\|\|\|\|\|\|\|\|\|\|\|\|\|\|\|\|\|\|\|\|\|\|\|\| | |
| SEQ_ID_NO_116 | 928 | LNTLVKQLSSNFGAISSVLNDILSRLDKVEAEVQIDRLITGRLQSLQTYV | 977 |
| SEQ_ID_NO_3 | 983 | TQQLIRAAEIRASANLAATKMSECVLGQSKRVDFCGKGYHLMSFPQSAPH | 1032 |
| | | \|\|\|\|\|\|\|\|\|\|\|\|\|\|\|\|\|\|\|\|\|\|\|\|\|\|\|\|\|\|\|\|\|\|\|\|\|\|\|\|\|\|\|\|\|\|:\|\|\| | |
| SEQ_ID_NO_116 | 978 | TQQLIRAAEIRASANLAATKMSECVLGQSKRVDFCGKGYHLMSFPQAAPH | 1027 |
| SEQ_ID_NO_3 | 1033 | GVVFLHVTYVPAQEKNFTTAPAICHDGKAHFPREGVFVSNGTHWFVTQRN | 1082 |
| | | \|\|\|\|\|\|\|\|\|\|\|:\|\|:\|\|\|\|\|\|\|\|\|\|:\|\|\|:\|\|\|\|\|\|\|\|.\|\|\|.\|\|:\|\|\|\| | |
| SEQ_ID_NO_116 | 1028 | GVVFLHVTYVPSQERNFTTAPAICHEGKAYFPREGVFVFNGTSWFITQRN | 1077 |
| SEQ_ID_NO_3 | 1083 | FYEPQIITTDNTFVSGNCDVVIGIVNNTVYDPLQPELDS----------- | 1121 |
| | | \|:.\|\|\|\|\|\|\|\|\|\|\|\|\|\|\|\|\|\|\|\|\|:\|\|\|\|\|\|\|\|\|\|\|\|\|\| | |
| SEQ_ID_NO_116 | 1078 | FFSPQIITTDNTFVSGNCDVVIGIINNTVYDPLQPELDSFKEELDKYFKN | 1127 |
| SEQ_ID_NO_3 | 1122 | -------------------------------------------------- | 1121 |
| SEQ_ID_NO_116 | 1128 | HTSPDVDLGDISGINASVVNIQKEIDRLNEVAKNLNESLIDLQELGKYEQ | 1177 |
| SEQ_ID_NO_3 | 1122 | -------------------------------------------------- | 1121 |
| SEQ_ID_NO_116 | 1178 | YIKWPWYVWLGFIAGLIAIVMVTILLCCMTSCCSCLKGACSCGSCCKFDE | 1227 |
| SEQ_ID_NO_3 | 1122 | --------------- | 1121 |
| SEQ_ID_NO_116 | 1228 | DDSEPVLKGVKLHYT | 1242 |

[0329] “Delivering” herein (e.g., as in methods of “delivering a betacoronavirus S protein or fragment thereof to a subject”) is used to generically refer to the breadth and variety of known delivery methods (e.g., DNA, RNA, subunit, or other) that may be utilized for that purpose (see herein below). In that way, for example, “delivery of a betacoronavirus S protein or S protein fragment” encompasses both the administration of a polynucleotide (DNA or RNA) encoding that betacoronavirus S protein or fragment as well as administration of that betacoronavirus S protein or fragment itself (i.e., subunit approach). If a particular delivery method or formulation is meant, such will be specified.

[0330] “Host cell” as used herein does not encompass a (whole) human organism.

[0331] “Human dose” means a dose which is in a volume suitable for human use (“human dose volume”) such as 0.25-1.5 ml. For example, a composition formulated in a volume of about 0.5 ml; specifically a volume of 0.45-0.55 ml; or more specifically a volume of 0.5 ml.

[0332] An “immune response” is a response of a cell of the immune system (such as a B cell, T cell, or monocyte) to a stimulus (e.g., an antigen). An immune response can be a B cell response (or “humoral immune response”), which results in the production of specific antibodies, such as antigen-specific neutralizing antibodies. A “neutralizing antibody response” may be complement-dependent or complement-independent. A neutralizing antibody response may be cross-neutralizing (a neutralizing antibody generated against an antigen from one virus strain, e.g., is neutralizing against the comparable antigen from another strain of that virus). An immune response can also be a T cell response, such as a CD4+ T cell response or a CD8+ T cell response. In some cases, the response is specific for a particular antigen (that is, an “antigen-specific response”), in particular, a modified betacoronavirus S protein or S protein fragment. If the antigen is derived from a pathogen, the antigen-specific response is a “pathogen-specific response” (e.g., a “MERS-CoV-specific immune response”, “a SARS-CoV-1-specific immune response”, or a “SARS-CoV-2-specific immune response”). A “protective immune response” is an immune response that reduces a detrimental function or activity of a pathogen, reduces infection by a pathogen (including cell entry), reduces cell-to-cell spread of a pathogen, and/or decreases symptoms (including death) that result from infection by the pathogen. A protective immune response can be measured, for example, by the inhibition of viral replication or plaque formation in a plaque reduction assay or ELISA-neutralization assay, or by measuring resistance to pathogen challenge in vivo. It may be further specified that the humoral immune response, CD4 T cell response, or CD8 T cell response is “at natural immunity”, “comparable to natural immunity”, or “above natural immunity”. It would be understood that what constitutes “natural immunity” is determined by analysis of patient subpopulations' immune responses to natural infection and whether or not a candidate vaccine elicits an immune response that is comparable to or greater than (above) natural immunity is a common consideration by regulatory bodies for a vaccine's market approval. Methods for measuring an immune response are known and may include, for measure of the humoral response, the Geometric Mean Titre (GMT) with 95% Confidence Interval (CI) of neutralizing antibodies and/or, for measure of the cell-mediated/cellular response, the concentration of T cell cytokines. For example, induction of proliferation or effector function of the particular lymphocyte type of interest (e.g., B cells, T cells, T cell lines, and T cell clones) may be assessed; for example, spleen cells from immunized mice can be isolated and the capacity of cytotoxic T lymphocytes to lyse autologous target cells that contain a polynucleotide (e.g., a self-replicating RNA molecule) that encodes the modified betacoronavirus S protein or S protein fragment. In addition, T helper cell differentiation can be analyzed by measuring proliferation or production of TH1 (IL-2, TNF-α, or IFN-γ) cytokines and/or TH2 (IL-4 or IL-5) cytokines by ELISA or directly in CD4+ T cells by cytoplasmic cytokine staining and flow cytometry. Contemporary techniques for such analysis often include Enzyme-Linked Immunospot (ELIspot) and Flow Cytometry (FCM)-based detection. Certain cytokines are associated with certain classes of T cell(s) and, thus, the measure of those cytokines is associated with a cellular (T cell) immune response. Exemplary cytokines and their associated class of T cell(s) are below. Literature on detecting and quantifying an immune response includes: Plebanski et al. 2010 Expert Rev. Vaccines 9(6):596-600; Todryk 2018 Vaccines (Basel) 6(4): 84; Folds and Schmitz 2003 J. Allergy Clinical Immunology 111(2) Supplement 2: S702-S711; and Falchetti et al. 1998 Immunology 95:346-351.

| Cytokines | Class of T cell |
|---|---|
| IFNγ, TNFα, IL-2 | Th1 |
| IL-4 , IL-5, IL-6, IL-9, IL-10, IL-13 | Th2 |
| IL-17 A/F, IL-22, IL-21, IL-25, | Th17 |
| IL-26 | |

[0333] “At natural immunity” or an immune response “comparable to natural immunity” means not materially different or not statistically different than natural immune response. An immune response that is “at or above natural immunity” means an immune response comparable to natural immunity or greater than natural immunity by a statistically significant amount. Where a natural immune response would include both a humoral and cellular response, saying a vaccine induced immune response is “at or above natural immunity” means the vaccine-induced response solicited a humoral response that is comparable to or above the natural humoral response, solicited a cellular response that is comparable to or above the natural cellular response, or both (solicited both humoral and cellular responses that are comparable to or above the natural humoral and cellular responses, respectively). An immune response may be quantified by the measure of the humoral response (e.g., Geometric Mean Titre (GMT) with 95% Confidence Interval (CI) of neutralizing antibodies) and/or the cell-mediated/cellular response (e.g., concentration of T cell cytokines) of a test group subject(s) who received the candidate vaccine composition and that of a control group subject(s) who did not receive the candidate vaccine composition, then comparing them. If the test group values are not statistically different from the control group values (may be averaged values), then the test group's immune response is “at natural immunity” or “comparable to natural immunity”. If the test group values are above the control group's values (statistically different), then the test group values are “above natural immunity”.

[0334] “Immunogenicity” refers to an antigen's or composition's ability to induce an immune response. See generally, e.g., Ma et al., 2011 PLoS Path. 7(9), e1002200. An “immunogenic composition” is a composition that comprises one or more antigens that, administered to a subject, will induce an immune response. An immunogenic composition may also comprise an adjuvant (e.g., an immunostimulating adjuvant). As used herein, an immunogenic composition (e.g., a prophylactic or therapeutic vaccine composition) means that which is suitable for pharmaceutical use (e.g., comprises purified antigen(s)), including use for administration to a human subject.

[0335] An “effective amount” means an amount sufficient to cause the referenced outcome. An “effective amount” can be determined empirically and in a routine manner using known techniques in relation to the stated purpose. An “immunologically effective amount”, with respect to an antigen or immunogenic composition, is a quantity sufficient to elicit a measurable immune response in a subject (e.g., 1-100 μg of antigen). With respect to an adjuvant, an “adjuvanting effective amount” or “immunostimulating effective amount” (in the case of an adjuvant that is an immunostimulant) is a quantity sufficient to modulate an immune response (e.g., 1-100 μg of adjuvant). To obtain a protective immune response against a pathogen, it can require multiple administrations of an immunogenic composition. So in the context of, for example, a protective immune response, an “immunologically effective amount” encompasses a fractional dose that contributes in combination with previous or subsequent administrations to attaining a protective immune response.

[0336] “Enhanced thermostability” or “increased thermostability” means the molecule (e.g., modified S protein or S protein fragment) has at least a lower rate of unfolding, under comparable conditions, than a wild type S protein (e.g., comprising SEQ ID NO: 3) or control S protein (e.g., comprising SEQ ID NO: 4) (neither of which comprise a stabilizing mutation). As a specific example, a modified betacoronavirus S protein sequence, or fragment thereof, comprising one or more stabilizing mutations and that has enhanced thermostability means the modified betacoronavirus S protein or fragment unfolds slower or has an increased shelf life, under comparable conditions (e.g., the same conditions), than a wild type or control betacoronavirus S protein or S protein fragment that does not comprise one or more stabilizing mutation. As the context requires, the thermostability of two or more stabilized mutants may be compared and one may be said to be more thermostable than the other. “Conditions” as used herein includes experimental and physiological conditions. It may be specified that a composition comprising a stabilized mutant has an increased shelf life as compared to a composition comprising its wild type counterpart or a control (non-stabilized-mutant) molecule (i.e., the molecule does not comprise one or more stabilizing mutation). See, e.g., U.S. Pub. No. 2011/0229507; Clapp et al., 2011 J. Pharm. Sci. 100(2): 388-401, discussing increased stability via adjuvants and assessing antigen stability in altered pH, hydration, and temperature conditions; and Rossi et al., 2016 Infect. Immun. 84(6): 1735-1742. Stability herein may be provided by the delta stability (dStability or dS) scoring method, which is the computationally-determined difference between the relative thermostability of an in-silico mutant protein and that of the corresponding wild type or control (i.e., non-stabilized-mutant) protein. Methods of determining dStability are known (WO 2020/079586 (PCT/IB2019/058777), MALITO et al.) and may include the use of tools such as Molecular Operating Environment (MOE) software (REF: Molecular Operating Environment (MOE) software; Chemical Computing Group Inc., available at WorldWideWeb(www).chemcomp.com). dS is measured by kcal/mol. Lower dS values indicate higher protein stability, while higher dS values indicate lower protein stability. It may be specified that the mutant polypeptides of the present invention have a higher relative thermostability (in kcal/mol) as compared to a non-mutant polypeptide under the same experimental conditions. It may be further specified that the mutant polypeptides of the present invention have a lower dS value than a non-mutant polypeptide under the same experimental conditions. It will be understood from the present invention that a mutant polypeptide having a lower dS value as compared to a non-mutant polypeptide under the same experimental conditions is more stable than the non-mutant polypeptide. The stability enhancement can be assessed using differential scanning calorimetry (DSC) as discussed in Bruylants et al. 2005 Curr. Med. Chem. 12: 2011-2020 and Calorimetry Sciences Corporation's “Characterizing Protein stability by DSC” (Life Sciences Application Note, Doc. No. 2021102136 February 2006) or by differential scanning fluorimetry (DSF). An increase in (thermo)stability may be characterized as an at least about 2° C. increase in thermal transition midpoint (Tₘ), as assessed by DSC or DSF. See, for example, Thomas et al., 2013 Hum. Vaccin. Immunother. 9(4): 744-752. A “significant” increase in, or enhancement of, thermostability is defined as an increase of at least 5° C. in the calculated Tm of a complex (calculated by, for example, the protocol provided at Example 4.7 of WO 2020/079586 (PCT/IB2019/058777), MALITO et al.).

[0337] “Fragment,” refers to a portion (that is, a subsequence) of a polynucleotide/polypeptide and is generated by cleaving one or more residues from either end of the reference polynucleotide/polypeptide sequence (e.g., deletion of the transmembrane domain). In this way, a fragment is an exemplary deletion mutant. A fragment is at least 100, 200, 300, 400, 500, 600, 700, 800, 900, 1000, or 1100 amino acids in length (and any integer value in between). An “immunogenic fragment” is a portion of a polynucleotide/polypeptide that elicits an immune response (in the case of an antigen fragment) or modulates an immune response (in the case of an immunostimulant fragment). An “immunogenic fragment” refers to a molecule containing one or more epitopes (e.g., linear, conformational or both) capable of stimulating a host's immune system to make a humoral and/or cellular antigen-specific immunological response (i.e. an immune response which specifically recognizes a naturally occurring polypeptide, e.g., a viral or bacterial protein). An immunogenic fragment of an antigen retains at least one immunogenic epitope of its reference (“source”) polynucleotide/polypeptide. An “epitope” is that portion of an antigen that determines its immunological specificity. T- and B-cell epitopes can be identified empirically (e.g. using PEPSCAN or similar methods). Herein, when the reference (“source”) polynucleotide/polypeptide is described as having one or more specific amino acid substitutions (e.g., “an S protein comprising an F17S substitution, numbered according to SEQ ID NO: 3”), it is meant that a “fragment thereof” also comprises that one or more specific amino acid substitutions (e.g., the fragment thereof would also comprise the F17S substitution, numbered according to SEQ ID NO: 3). An exemplary immunogenic fragment for use herein consists a SARS-βCoV spike protein Receptor Binding Domain (RBD), such as an immunogenic fragment comprising the amino acids corresponding to residues 330-521 of any one of SEQ ID NOs: 5-114, optionally linked to a pharmaceutically acceptable carrier (e.g. a nanoparticle or IgG1 Fc), or delivered to a subject through an adeno-associated virus (AAV) or a Self-Amplifying RNA Molecule (SAM). Such immunogenic fragments consisting of a spike protein RBD were previously described for candidate MERS-CoV and SARS-CoV-1 vaccines (including Fc chimeric proteins and AAV delivery) (Zheng B J et al. 2008 Hong Kong Med J 14(Suppl 4):S39-43; Du L. et al. 2009 Nat. Rev. Microbio. 7:226-236; Wang et al. 2016 Antiviral Research 133: 165-177). For clarity and with respect to the substitution mutations provided herein, if the fragment is of a protein (e.g., an S protein) and that protein is said to comprise one or more of the presently provided substitution mutations; the “fragment thereof” also comprises those one or more substitution mutations.

[0338] “Immunodominance” is the immunological phenomenon in which immune responses are mounted against only a subset of the antigenic peptides produced by a pathogen. Immunodominance has been evidenced for antibody-mediated and cell-mediated immunity. As used herein, an “immunodominant antigen” is an antigen which comprises immunodominant epitopes. In contrast, a “subdominant antigen” is an antigen which does not comprise immunodominant epitopes, or in other terms, only comprises subdominant epitopes. As used herein, an “immunodominant epitope” is an epitope that is dominantly targeted, or targeted to a higher degree, during an immune response to a pathogen. As used herein, a “subdominant epitope” is an epitope that is not targeted, or targeted to a lower degree, during an immune response to a pathogen.

[0339] By “linked” it is meant the two or more referenced molecules or structures are connected, attached, fused, bound, or ligated. The two or more molecules and/or structures may be linked naturally (e.g., by the action of an endogenous enzyme and including the covalent or non-covalent bonds that naturally form between two proteins) or recombinantly (e.g., contacting two polynucleotides with a heterologous enzyme to ligate the polynucleotides together or recombinantly inserting one or more linkers between two proteins so that the proteins form a complex); and/or linked reversibly or irreversibly. For clarity, the two or more molecules and/or structures may be linked chemically (e.g., chemical conjugation of a protein and a sugar) or biologically (e.g., enzymatic conjugation of a protein and a sugar). “Linked” does not mean the two or more molecules and/or structures have to be next to each other (“adjacent”) without any other molecule or structure between them (“immediately adjacent to”)—it is well known, for example, that a gene's coding sequence may be linked to a control sequence (e.g., a promoter, enhancer, or IRES) and that the coding sequence may not be immediately adjacent to the control sequence: a coding sequence may be hundreds of base pairs away from its enhancer. Similarly, two genes located on the same chromosome (with hundreds or thousands of base pairs between them) are said to be “linked” in the field.

[0340] By “modify” or “modified”, it is meant that molecule (such as a peptide or polypeptide or nucleic acid or polynucleic acid) is changed in structure with reference to a reference molecule by changing the structure thereof. When referring to molecules that are not naturally occurring, the modified molecules do not include naturally occurring molecules and/or naturally occurring mutation.

[0341] By “mutation”, it is meant an insertion, deletion, or substitution (e.g., point mutation) of a nucleic acid residue or amino acid residue. A substitution herein excludes an “identical mutation,” which is the substitution of a nucleic/amino acid residue with a natural or synthetically produced residue having the same chemical structure. By way of example, the substitution of alanine at position 27 of the sequence SEQ ID NO: 3 with an alanine analog (A′) as in A27A′ is an “identical mutation” as used herein and is not within the meaning of “substitution” here. A mutation herein may be clarified with the proviso that an identical mutation is excluded. A “receptor binding mutation” means one or more mutations (sequence modifications) at a location that, in the wild type or control sequence, is involved in receptor binding (e.g., receptor recognition or binding per se). A variety of approaches may be implemented, independently or together, through the introduction of receptor binding mutations such as, for example, knock-down (KD) or knock-out (KO) approach whereby residues involved in wild type receptor binding are mutated (“receptor binding knock-down mutations” or “receptor binding knock-out mutations”, respectively); another approach being the introduction of glycosylation sites (e.g., introduction of the N-linked glycosylation N—X-T or N—X—S motif, where X is not proline) so that residues involved in wild type receptor binding are shielded (encumbered) (“receptor binding glycan mutations” or “receptor binding N-glycan mutations”).

[0342] The term “nucleic acid” in general means a polymeric form of nucleotides of any length, which contain deoxyribonucleotides, ribonucleotides, and/or their analogs. It includes DNA, RNA, DNA/RNA hybrids. It also includes DNA or RNA analogs, such as those containing modified backbones (e.g. peptide nucleic acids (PNAs) or phosphorothioates) or modified bases. Thus, the nucleic acid of the disclosure includes mRNA, DNA, cDNA, recombinant nucleic acids, branched nucleic acids, plasmids, vectors, etc. Where the nucleic acid takes the form of RNA, it may or may not have a 5′ cap. Nucleic acid molecules as disclosed herein can take various forms (e.g. single-stranded, double-stranded) but are nonetheless recombinant and may comprise heterologous sequences (e.g., a heterologous signal sequence polynucleotide operably linked to an S protein polynucleotide).

[0343] “Operably linked” means two or more molecules (e.g., DNA, RNA, protein, peptides, chemical compounds, or a combination thereof) are linked or attached (e.g., directly or indirectly in a covalent or non-covalent, perhaps reversible, manner) such that the function of the two or more molecules is maintained. In the context of regulatory elements, for example, such as an enhancer and a promoter, it is well understood that non-adjacent DNA sequences are “linked” in that they are within the same polynucleotide sequence and “operably linked” in that each performs its function (as an enhancer and as a promoter, respectively). In the context of a fusion/chimeric protein comprising, for example, a carrier (such as a nanoparticle, antibody, or antibody fragment) operably linked to a protein antigen, it would be understood that a variety of linkage techniques may be used and that “operably linked” would refer to the function of the nanoparticle (or antibody or antibody fragment) as carrier and of the protein as antigen being maintained.

[0344] “Purified” means removed from its natural environment and substantially free of impurities from that natural environment (such as other chromosomal and extra-chromosomal DNA and RNA, organelles, and proteins (including other proteins, lipids, or polysaccharides which are also secreted into culture medium or result from lysis of host cells). For clarity and as used herein, an antigen within a pharmaceutical, immunogenic, vaccine, or adjuvant composition is a purified antigen (whether or not the word “purified” is recited). It is understood in the field that for an antigen, agent, adjuvant, additive, vector, molecule, compound, or composition in general to be suitable for pharmaceutical or vaccine use (i.e., “pharmaceutically acceptable”), it must be purified (i.e., not crude). It would be further understood that “purified” is a relative term and that absolute (100%) purity is not required for, e.g., pharmaceutical or vaccine use. A molecule may be at a purity of at least 85%, 86%, 87%, 88%, 89%, 90%, 91%, 92%, 93%, 94% or 95% of a composition's total proteinaceous mass (determined by, e.g., gel electrophoresis). Methods of purification are known and include, e.g., various types of chromatography such as High Performance Liquid Chromatography (HPLC), hydrophobic interaction, ion exchange, affinity, chelating, and size exclusion; electrophoresis; density gradient centrifugation; or solvent extraction. “Isolated” means removed from its natural environment and not linked to a recombinant molecule or structure (e.g., not bound to a recombinant antibody or antibody fragment) including not linked to a laboratory tool (e.g., not linked to a chromatography tool such as not bound to an affinity chromatography column). Hence, an “isolated betacoronavirus antigen”, such as an “isolated modified betacoronavirus Spike protein or Spike protein fragment”, is not on the surface of a betacoronavirus-infected cell or within an infectious betacoronavirus virion or bound to a recombinant antibody or recombinant antibody fragment (which occurs in an ELISA assay, for example). It would be understood that an antigen being bound to an antibody or antibody fragment (through epitope recognition, for example) is different than an antigen being operably linked to an antibody or antibody fragment (operable linkage in that case would use recombinant techniques and produces a molecule that does not occur in nature).

[0345] “Recombinant” when used to describe a biological molecule or biological structure (e.g., protein, nucleic acid, organism, cell, vesicle, sacculi, or membrane) means the biological molecule or biological structure is artificially produced (e.g., by laboratory methods), synthetic, and/or has a different structure and or function than the molecule or structure from which it was obtained or than its wild type counterpart. For clarity, a recombinant molecule or recombinant structure that is synthetic may nonetheless function comparably to its wild type counterpart. For clarification, a “recombinant nucleic acid” or “recombinant polynucleotide” means a nucleic acid/polynucleotide that, by virtue of its origin or manipulation (e.g., by laboratory methods), (1) is not associated with all or a portion of the polynucleotide with which it is associated in nature; and/or (2) is linked to a polynucleotide other than that to which it is linked in nature. A “recombinant protein/polypeptide” thereby encompasses a protein/polypeptide produced by expression of a recombinant polynucleotide. For clarification, a “purified protein” (e.g., a protein suitable for pharmaceutical use) is encompassed within the term “recombinant protein” because a purified protein is both artificially produced and has a different function than the crude protein (or extract or culture) from which it was obtained. A biological molecule or biological structure of the present invention may be described as “artificially produced”. “Heterologous” denotes that the two referenced biological molecules or biological structures are not naturally associated with each other (would not contact each other but-for the hand of man) or that the referenced biological molecule/structure is not in its natural environment. For example, when a nucleic acid molecule is operably linked to another polynucleotide that it is not associated with in nature, the nucleic acid molecule may be referred to as “heterologous” (i.e., the nucleic acid molecule is heterologous to at least the polynucleotide). Similarly, when a polypeptide is in contact with or in a complex with another protein that it is not associated with in nature, the polypeptide may be referred to as “heterologous” (i.e., the polypeptide is heterologous to the protein). Further, when a host cell comprises a nucleic acid molecule or polypeptide that it does not naturally comprise, the nucleic acid molecule and polypeptide may be referred to as “heterologous” (i.e., the nucleic acid molecule is heterologous to the host cell and the polypeptide is heterologous to the host cell).

[0346] “Reducing” means to lower or eliminate (i.e., “reduce/-ing” includes zero or 100% reduction). “Lowering” as used herein does not include zero (i.e., excludes 100% reduction or elimination). “Prevention” means to inhibit or stop (i.e., “prevent/-ing/-ion” includes zero or 100% blockage). “Inhibition” as used herein does not include zero (i.e., “inhibit/-ing/-ion” excludes 100% blockage or stopping).

[0347] Consistent with the official naming conventions in the art, the Severe Acute Respiratory Syndrome (SARS) betacoronavirus human pathogen which caused the international 2019/2020 pandemic may be referred to as “SARS-CoV-2” (the official name, 2020 Nat. Microbiol. 5(4):536:544; see Wang et al. 2020 Cell 181:894-904, with previous names being “WH-Human1” (see Wu et al. 2020 Nature 579:265-269) and “2019-nCoV” (see Wrapp et al. 2020 Science 367(6483):1260-1263). The respiratory disease(s) caused by SARS-CoV2 may be referred to as “COVID-19” (2020 Nat. Microbiol. 5(4):536:544), e.g. viral pneumonia having exemplary symptoms of fever, cough, and/or dyspnea). For clarity, “SARS-CoV-1” is used herein to refer to the SARS betacoronavirus, lineage B human pathogen which caused an epidemic in 2002/2003 (see Li et al. 2005 Science 309:1864-1868). What is “SARS-CoV-1” herein is usually referred to as just “SARS-CoV” in the art. “SARS-βCoV” may be used herein to refer to SARS betacoronaviruses in general (including MERS-CoV, SARS-CoV-1, and SARS-CoV02). “SARS-β, BCoV” may be used to refer to SARS beta, lineage B coronaviruses in general (including SARS-CoV-1 and SARS-CoV-2).

[0348] “Sequence identity” as used herein means matches between two nucleic acids or two amino acids. As would be understood within the field, a “match” during sequence alignment is assigned when the two nucleic/amino acids are the same or comparable to the other (such as when one is a synthetic analog of the other). To be clear, as used herein a sequence “match”, and therefore “sequence identity”, does not encompass what are known as “conserved substitutions” or “conservatively substituted residues” by the field. Unless specified otherwise, “sequence identity” as used herein means the nucleic/amino acids are the same (identical) and not merely similar or “conserved substitutions” of each other. “Sequence identity” is determined by sequence alignment, such as by pairwise, global alignment using the Needleman-Wunsch algorithm and default parameters. Pairwise sequence alignment and the various algorithms therefor, is well understood in the art (Mullan 2005 Briefings in Bioinformatics 7(1):113-115); as are multiple sequence alignment methodologies and algorithms (Daugelaite et al. 2013 ISRN Biomathematics 2013 (Article ID 615630): 14 pages). As an example, Clustal Omega is a popular multiple sequence alignment (MSA) tool by EMBL-EBI and COBALT is a popular MSA tool by NCBI (each with its own functionalities). For clarification, N-terminal or C-terminal (or 5′ or 3′) residues such as signal peptides, tags, or leader sequences may be excluded from an alignment. With many alignment tools, an asterisk (*) denotes identity between residues, a colon (:) denotes highly similar residues, a period (.) denotes weakly similar residues, and a space ( ) denotes no similarity; a hyphen (-) denotes a gap. “Percent sequence identity” between two amino acid sequences or between two nucleic acid sequences means the percentage of nucleic/amino acid residue matches between the two sequences over the reported aligned region (including any gaps in the length); such as the percentage of identical residue matches between the two sequences over the reported aligned region following pairwise, global alignment using the Needleman-Wunsch algorithm and default parameters. It is well understood in the field that two sequences may be identical but-for one or more inserted or deleted residues (gaps). Such gaps may be “end gaps” (i.e., insertions or deletions at the N-terminal or C-terminal (for protein) or 5′ or 3′ (for polynucleotide) ends of the sequence) or “internal gaps” (gaps in the length of a sequence, i.e., are not located at the end (first or last residue) of the sequence). Therefore, use of an alignment algorithm that accounts for at least internal gaps is preferred. One such alignment algorithm is the pairwise, global Needleman-Wunsch algorithm. Percent sequence identity herein is preferably determined by pairwise, global alignment with the Needleman-Wunsch algorithm (Needleman and Wunsch, 1970 J. Mol. Biol. 48(3): 443-453), using default parameters (“Needleman-Wunsch algorithm with default parameters” means: Gap opening penalty (GAP OPEN) 10.0 and with Gap extension penalty (GAP EXTEND) 0.5, with no penalty for end Gaps (END GAP PENALTY FALSE), and using the EBLOSUM62 scoring matrix (BLOSUM62 scoring table) for amino acid sequences or EDNAFULL scoring matrix for nucleotide sequences). The Needleman-Wunsch algorithm and these default parameters is implemented in the publicly available Needle tool in the EMBL-EBI EMBOSS package (Rice et al. 2000 Trends Genetics 16: 276-277; see also the World Wide Web at ebi.ac.uk/Tools/psa/emboss_needle). Preferably, the default “pair” output format from EMBOSS Needle is used. It may therefore be specified herein that “X has Y % sequence identity to the sequence SEQ ID NO: W, as determined by the Needleman and Wunsch algorithm with default parameters”. Percent sequence identity” is calculated by dividing the [total number of identical residues] (numerator) by the [total number of aligned residues](denominator) and then multiplying that result by 100; optionally then rounding down to the next nearest whole number. See the example alignment herein above. It is notable that the denominator for a percent sequence identity calculation following alignment with the Needleman and Wunsch algorithm with default parameters may not be equal to the total length of either sequence (see the example alignment herein above at the description of “corresponding to” and “corresponds to”). Provided herein are polypeptides (e.g., Spike proteins) comprising an amino acid sequence with at least 65%, 66%, 67%, 68%, 69%, 70%, 71%, 72%, 73%, 74%, 75%, 76%, 77%, 78%, 79%, 80%, 81%, 82%, 83%, 84%, 85%, 86%, 87%, 88%, 89%, 90%, 91%, 92%, 93%, 94%, 95%, 96%, 97%, 98%, 99%, or 100% identity to the sequence selected from the group consisting of SEQ ID NOs: 5-114 (or also to SEQ ID NOs 125-134). Provided herein are polypeptides (e.g., Spike proteins such as Spike protein fragments) comprising a Receptor Binding Domain consisting of an amino acid sequence with at least 65%, 66%, 67%, 68%, 69%, 70%, 71%, 72%, 73%, 74%, 75%, 76%, 77%, 78%, 79%, 80%, 81%, 82%, 83%, 84%, 85%, 86%, 87%, 88%, 89%, 90%, 91%, 92%, 93%, 94%, 95%, 96%, 97%, 98%, 99%, or 100% identity to the residues corresponding to 330-521 of the sequence selected from the group consisting of SEQ ID NOs: 5-114 (or also to SEQ ID NOs 125-134).

[0349] “Stabilizing mutation” means a mutation in a betacoronavirus S protein (or S protein fragment) polynucleotide or amino acid sequence that has the effect of “stabilizing” the mutant S protein (or mutant S protein fragment). A “stabilized” protein or protein fragment has, for example, decreased misfolding, reduced protein domain movements, reduced protein domain rearrangements, increased half-life in-vitro or in-vivo, increased melting temperature (Tm), and/or increased thermostability as compared to a wild type protein (e.g., wild type S protein SEQ ID NO: 3), control protein, or control protein fragment (e.g., control S protein fragment SEQ ID NO: 4). See McCallum et al. 2020 bioRxiv HyperTextTransferProtocolSecure://doi.org/10/1101/2020.06.03.129817; Henderson et al. 2020 bioRxiv HyperTextTransferProtocolSecure://doi.org/10.1101/2020.05.18.102087. Stabilizing mutations include the HBNet mutations, PROSS mutations, HBNet-PROSS mutations, and/or Disulfide Mutations summarized within tables herein. See also SEQ ID NOs: 5-64. A stabilizing mutation is not detrimental to the use of the resultant mutant protein (e.g., S protein or S protein fragment) as an antigen. In particular, the HBNet mutations, PROSS mutations, HBNet-PROSS mutations, and Disulfide Mutations of the tables herein were designed to conserve putative S protein epitopes and tertiary/three-dimensional structure generally so that resultant mutant S proteins remain immunogenic (regarding SARS-CoV-2 epitopes, see Grifoni et al. 2020 Cell 181:1-13 and Supplementary Materials; Kiyotani et al. 2020 J. Hum. Genet. HyperTextTransferProtocolSecure://doi.org/10.1038/s10038-020-0771-5). A molecule comprising one or more stabilizing mutation may be referred to as a “stabilized mutant”. A disulfide bridge forms between two cysteine (C) residues within a polypeptide (or between two cysteine residues that are each within a different polypeptide, as in the context of protein complexes). Therefore, a “disulfide bridge mutation” means the substitution mutations for introducing a disulfide bridge into the molecule (e.g., modified S protein or S protein fragment). If the molecule already comprises a cysteine residue at the target disulfide bridge location (e.g., one cysteine residue innately exists there within the wild type sequence), then one substitution mutation to cysteine (C) may be sufficient to introduce a disulfide bridge (and thereby increase the stability of the resultant mutant molecule). Alternatively, two substitution mutations to cysteine (C) will be needed at the target disulfide bridge location.

[0350] A “subject” is a living multi-cellular vertebrate organism and as used herein, a mammal. In the context of this disclosure, the subject can be an experimental subject, such as a non-human mammal, e.g., a mouse, a guinea pig, a cotton rat, or a non-human primate. Alternatively, the subject can be a human subject. In particular, a subject herein may be a human subject at risk of being infected or reinfected with a betacoronavirus (e.g., MERS-CoV, SARS-CoV-1, or SARS-CoV-2), at risk of reactivation, antibody-dependent enhancement of disease, or at risk of respiratory disease (e.g., COVID-19). A subject which has been infected with the virus prior to being treated with an immunogenic composition herein may have shown clinical signs of the infection (symptomatic subject) or may not have shown clinical signs of the viral infection (asymptomatic subject). In one embodiment, the symptomatic subject has shown several episodes with clinical symptoms of infections over time (recurrences) separated by periods without clinical symptoms.

[0351] As used herein, the terms “treat” and “treatment” as well as words stemming therefrom, are not meant to imply a “cure” of the condition being treated in all individuals, or 100% effective treatment in any given population. Rather, there are varying degrees of treatment which one of ordinary skill in the art recognizes as having beneficial therapeutic effect(s). In this respect, the methods and uses herein can provide any level of treatment of betacoronavirus infection and, in particular, MERS-CoV, SARS-CoV-1, or SARS-CoV-2 related disease in a subject in need of such treatment, and may comprise reduction in the severity, duration, or number of recurrences over time, of one or more conditions or symptoms of betacoronavirus (e.g., MERS-CoV, SARS-CoV-1, or SARS-CoV-2) infection, and in particular SARS-CoV-2 related disease (e.g., COVID-19).

[0352] As used herein, “therapeutic immunization” or “therapeutic vaccination” refers to administration of the immunogenic compositions of the invention to a subject, preferably a human subject, who is known to be infected with a pathogen (e.g., a betacoronavirus such as MERS-CoV, SARS-CoV-1, and/or SARS-CoV-2) at the time of administration, to treat the infection or pathogen-related disease or to prevent reinfection or reactivation. As used herein, “prophylactic immunization” or “prophylactic vaccination” refers to administration of the immunogenic compositions of the invention to a subject, preferably a human subject, within whom pathogen cannot be detected (e.g., who is not infected with pathogen) at the time of administration, to prevent infection or pathogen-related disease.

[0353] A “total dose” means the sum of doses (e.g., sum of partial doses co-administered or administered in close temporal sequence). When there is only one dose administration, that dose is the “total dose.”

[0354] As used herein, a “variant” is a nucleic acid molecule or peptide that differs in sequence from a reference nucleic acid molecule or peptide, respectively, but retains essential properties of the reference molecule/peptide. Changes in the sequence of variants are limited or conservative, so that its sequence is highly similar overall and, in many regions, identical to the sequence of the reference molecule/peptide. A variant and reference molecule/peptide can differ in sequence by one or more substitutions, additions or deletions in any combination. A variant of a nucleic acid molecule or peptide can be naturally occurring, such as an allelic variant (e.g., several SARS-CoV-2 spike protein variants are known in the art, see Wrapp et al. 2020 Science 367(6483):1260-1263). Non-naturally occurring variants of nucleic acids and peptides may be made by mutagenesis techniques or by direct synthesis.

[0355] The singular terms “a,” “an,” and “the” include plural referents unless context clearly indicates otherwise. Similarly, the word “or” is intended to include “and” unless the context clearly indicates otherwise (see also “and/or” herein). The term “plurality” refers to two or more.

[0356] The term “comprises” is open-ended and means “includes.” Thus, unless the context requires otherwise, the word “comprises” or “has”, and variations thereof (including “comprise” and “comprising” or “have” and “having”, respectively), will be understood to imply the inclusion of a stated compound(s), molecule(s), composition(s), or steps, but not to the exclusion of any other compound(s), molecule(s), composition(s), or steps. The terms “comprising” and “having” when used as a transition phrase herein are open-ended whereas the term “consisting of” when used as a transition phrase herein is closed (i.e., limited to that which is listed and nothing more). In certain embodiments and for readability, the word “is” may be used as a substitute for “consists of” or “consisting of”. The abbreviation, “e.g.” is derived from the Latin exempli gratia, and is used herein to indicate a non-limiting example. Thus, the abbreviation “e.g.” is synonymous with the term “for example.”

[0357] Unless specifically stated otherwise, providing a numeric range (e.g., “25-30”) is inclusive of endpoints (i.e., includes the values 25 and 30). An endpoint of a range may be excluded by reciting “exclusive of lower endpoint” or “exclusive of upper endpoint”. Both endpoints may be excluded by reciting “exclusive of endpoints”.

[0358] Unless specifically stated, a process comprising a step of mixing two or more components does not require any specific order of mixing. Thus, components can be mixed in any order. Where there are three components then two components can be combined with each other, and then the combination may be combined with the third component, etc. Similarly, while steps of a method may be numbered (such as (1), (2), (3), etc. or (i), (ii), (iii)), the numbering of the steps does not mean that the steps must be performed in that order (i.e., step 1 then step 2 then step 3, etc.). The word “then” may be used to specify the order of a method's steps.

[0359] The following terminology may be used to reference amino acid residues: Alanine (Ala or A), Arginine (Arg or R), Asparagine (Asn or N), Aspartic acid (Asp or D), Cysteine (Cys or C), Glutamic acid (Glu or E), Glutamine (Gln or Q), Glycine (Gly or G), Histidine (His or H), Isoleucine (Ile or I), Leucine (Leu or L), Lysine (Lys or K), Methionine (Met or M), Phenylalanine (Phe or F), Proline (Pro or P), Serine (Ser or S), Threonine (Thr or T), Tryptophan (Trp or W), Tyrosine (Tyr or Y), Valine (Val or V).

### Spike Proteins

[0360] Coronaviral infections initiate with binding of virus particles to host surface cellular receptors. Receptor recognition is therefore an important determinant of the cell and tissue tropism of the virus. In addition, the virus must be able to bind to the receptor counterparts in other species for inter-species-transmission to occur. With the exception of HCoV-OC43 and HKU1, both of which engage sugars for cell attachment, human coronaviruses (HCoVs) recognize proteinaceous receptors. HCoV-229E binds to human aminopeptidase N (hAPN); MERS-CoV interacts with human dipeptidyl peptidase 4 (hDPP4 or hCD26); and all three of SARS-CoV-1, hCoV-NL63, and SARS-CoV-2 interact with human angiotensin-converting enzyme 2 (hACE2). See Wang et al. 2020 Cell 181: 894-904.

[0361] Structural proteins are encoded by one-third of coronavirus (CoV) genomes (one-third from the 3′ end), such structural proteins including the spike (S) glycoprotein, small envelope protein (E), integral membrane protein (M), and genome-associated nucleocapsid protein (N). See SEQ ID NO: 1. Some CoVs also contain a hemagglutinin esterase (HE). Interspersed between these genes, are several genes coding for accessory proteins, many of which are involved in regulating the host immune system. The proteins E, M, and N are mainly responsible for the assembly of the virions, while the S protein has an essential role in virus entry and determines tissue and cell tropism, as well as host range. Wang et al. 2016 Antiviral Research 133: 165-177.

[0362] In CoVs, the process for entry into host cells is mediated by the densely glycosylated, envelope-embedded, surface-located spike (S) glycoprotein (“S protein”). The S protein is a homotrimeric class I fusion protein with two subunits in each spike monomer (or “protomer”), called “S1” and “S2”, which are responsible for receptor recognition and membrane fusion, respectively. Wrapp et al. 2020 Science 367(6483):1260-1263. The S protein is in a metastable prefusion conformation that, when triggered by the S1 subunit binding to a host cell receptor, undergoes a substantial structural rearrangement to fuse the viral membrane with the host cell membrane. Wrapp et al. 2020 Science 367(6483):1260-1263 and Wang et al. 2020 Cell 181: 894-904. Receptor binding destabilizes the prefusion homotrimer, resulting in the shedding of the S1 subunit and transition of the S2 subunit to a stable postfusion conformation (in the case of MERS-CoV and SARS-CoV-2, but not SARS-CoV-1, the S protein is cleaved by host proteases (furin) into the S1 and S2 subunits, enabling S2 to form its stable postfusion conformation). Wrapp et al. 2020 Science 367(6483):1260-1263 and Wang et al. 2020 Cell 181: 894-904; see also Follis et al. 2006 Virology 350:358-369. The S1 subunit can be further divided into an N-terminal domain (NTD) and a Receptor Binding Domain (RBD) (the RBD is also called a C-terminal domain (CTD)). See Wrapp et al. 2020 Science 367(6483):1260-1263 & Suppl. Material as well as Wang et al. 2020 Cell 181: 894-904 for the structures of SARS-CoV-1 and SARS-CoV-2; see also Yuan et al. 2017 Nat. Comm. 8(15092), 9 pgs & Suppl. Materials for the structures of MERS-CoV and SARS-CoV-1. hCoV-NL63, SARS-CoV-1, and SARS-CoV-2 all utilize the RBD to interact with the hACE2 receptor. Wang et al. 2020 Cell 181: 894-904. A “full length betacoronavirus S protein” herein means it comprises (from N-terminus to C-terminus) the NTD through to, and including, the cytoplasmic tail (CT). A “CT-deleted betacoronavirus S protein fragment” herein means it comprises the NTD through to, and including, the transmembrane (TM) domain. A “TM-deleted betacoronavirus S protein fragment” means it comprises the NTD up to, and excluding, the TM domain (but a TM-deleted betacoronavirus S protein fragment may be operably linked at the C-terminus to a cytoplasmic tail or other (optionally heterologous) amino acid(s)).

[0363] In the context of vaccination by delivery of a betacoronavirus S protein or S protein fragment, it is desirable to deliver a prefusion conformation betacoronavirus S protein or S protein fragment. To lock a betacoronavirus S protein or S protein fragment in prefusion conformation, one or more proline substitutions may be introduced into its sequence, preferably one or two proline substitutions, and introduced at or near (e.g., within two residues N- or C-terminal to, or within two residues C-terminal to) the boundary between the Heptad Repeat 1 (HR1) and the Central Helix (CH). The HR1/CH boundary within SARS-CoV-2 sequence SEQ ID NO: 3 is between D959 and K960, within SARS-CoV-1 sequence SEQ ID NO: 116 the HR1/CH boundary is between D954 and K955 (see Wrapp et al. 2020 Science 367(6483):1260-1263 at Suppl. Materials FIG. S5); which residues correspond to D1040 and K1041, respectively, of MERS-CoV sequence SEQ ID NO: 118. To lock SARS-CoV-2 S protein in prefusion conformation, it is sufficient to introduce one proline residue. In particular, it is sufficient to substitute K960, numbered according to SEQ ID NO: 3, with proline (P). Therefore, a preferred embodiment provides a modified betacoronavirus S protein or fragment thereof comprising a proline (P) at the residue corresponding to 960 of the sequence SEQ ID NO: 3 (see, e.g., SEQ ID NO: 39). It was previously demonstrated that the introduction of two proline residues at or near the boundary between the SARS-CoV-2 S protein HR1 and CH is sufficient to lock the S protein in prefusion conformation (see WO2018/081318 (PCT/US2017/058370), GRAHAM B. et al. and Wrapp et al. 2020 Science 367(6483):1260-1263). In particular, the substitution of both K960 and V961, numbered according to SEQ ID NO: 3, to proline was shown to lock SARS-CoV-2 S protein in prefusion conformation (WO2018/081318 (PCT/US2017/058370), GRAHAM B. et al. and Wrapp et al. 2020 Science 367(6483):1260-1263). Therefore, another embodiment provides a modified betacoronavirus S protein or fragment thereof comprising the mutation of two immediately adjacent residues at or within two residues of the HR1/CH boundary wherein the mutations are substitutions to proline. A further preferred embodiment provides a modified betacoronavirus S protein or fragment thereof comprising prolines (P) at the residues corresponding to 960 and 961 of the sequence SEQ ID NO: 3.

[0364] To provide a prefusion conformation betacoronavirus S protein or S protein fragment or to promote the formation of trimeric complexes, it may be desirable to insert a trimerization domain (e.g., the T4 fibritin trimerization (foldon) motif) into the C-terminus of the S protein or S protein fragment. In particular, a betacoronavirus S protein fragment having an inactive transmembrane domain (e.g., inactive by deletion) or, optionally, lacking the entire C-terminus (e.g., lacking by deletion), comprises the ectodomain sequence operably linked (e.g., through the inclusion of one or more linker residues) to a trimerization domain sequence (e.g., a heterologous trimerization domain) such as the T4 fibritin trimerization (foldon) motif (see an example of this technique with MERS-CoV and SARS-CoV-1 by Yuan et al. 2017 Nat. Comm. 8(15092), 9 pgs & Suppl. Materials).

[0365] In the context of vaccination by delivery of a betacoronavirus S protein or S protein fragment, it is desirable to keep the S1 and S2 subunits operably linked, especially if prefusion conformation is desired and/or cell surface protein expression or protein secretion is desired. In the context of MERS-CoV or SARS-CoV-2 S proteins, it is thus desirable to prevent furin cleavage of the S1 and S2 subunits. For betacoronavirus vaccination by delivery of a MERS-CoV or SARS-CoV-2 S protein or S protein fragment, it is therefore desirable to deliver a furin-cleavage abrogated S protein or S protein fragment. Furin-cleavage abrogation may be achieved by introducing substitution mutations into the R—X—X—R furin recognition/cleavage motif (where the arginines (R) are “furin motif arginines” and where X is any amino acid) as was previously shown for the ⁶⁵⁶RRAR⁶⁵⁹ SARS-CoV-2 S1/S2 furin recognition site (see Wrapp et al. 2020 Science 367(6483):1260-1263, numbered according to SEQ ID NO: 3) and for the ⁷³⁰RSVR⁷³³ MERS-CoV S1/S2 furin recognition site (see Millet and Whittaker 2014 PNAS 111(42):15214-15219, numbered according to SEQ ID NO: 118). Yuan et al. (2017 Nat. Comm. 8(15092), 9 pgs & Suppl. Materials) also demonstrate a furin abrogated MERS-CoV S protein by mutation within the furin recognition motif. It is notable that wild type SARS-CoV-1 S protein maintains the residue corresponding to the C-terminal furin motif arginine (R), not the N-terminal furin motif arginine (see Wrapp et al. 2020 Science 367(6483):1260-1263 Supplemental Materials at FIG. S5). In particular, furin-cleavage abrogation may be achieved by introducing one or more substitution mutations into the furin motif, wherein the one or more substitution mutations comprise a substitution of one or both of the furin motif arginines (R). An embodiment therefore provides a betacoronavirus (βCoV) S protein or fragment thereof comprising one or more substitution mutations at the residues corresponding to R656-R659 of the sequence SEQ ID NO: 3, wherein the one or more substitution mutations include the substitution of one or both of the residues corresponding to R656 and R659 of the sequence SEQ ID NO: 3; optionally wherein the wild type or control βCoV S protein is cleaved by furin (e.g., MERS-CoV or SARS-CoV-2 S protein).

[0366] Natural sequence variation exists between betacoronavirus S proteins, even between S proteins from the same virus. As an example, 9 naturally occurring amino acid variations have been identified between SARS-CoV-2 S proteins: 3 in the NTD (F321, H49Y, S247R); 3 in the RBD (N354D, D364Y, V367F); 1 in the SD2 (D614G); and 2 in the S2 (V1129L, E1262G) (numbered according to SEQ ID NO: 3, see Wrapp et al. 2020 Science 367(6483):1260-1263 and Supplemental Materials thereof). In certain embodiments is provided a modified betacoronavirus S protein or fragment thereof having a sequence that does not include the substitution F32I, H49Y, S247R, N354D, D364Y, V367F, D614G, V1129L, or E1262G, or combinations thereof, numbered according to SEQ ID NO: 3. A particular embodiment provides a modified betacoronavirus S protein or fragment thereof having a sequence that does not include the substitution F32I, H49Y, S247R, N354D, D364Y, V367F, V 1129L, or E1262G, or combinations thereof, numbered according to SEQ ID NO: 3. It would alternatively be understood that one or more of such naturally occurring sequence variants may be included within a modified betacoronavirus S protein or S protein fragment sequence of this invention. In the context of vaccination, inclusion of one or more natural S protein sequence variants may be desirable if such variant is suspected of having a functional effect. As an example, the SD2 D614G substitution (numbered according to SEQ ID NO: 3) is believed to impact SARS-CoV-2 virulence (Brufsky 20 Apr. 2020 J Med Virol, 7 pages, doi: 10.1002/jmv.25902; Korber et al. 2020 bioRxiv (HyperTextTransferProtocolSecure: //doi.org/10.1101/2020.04.29.069054)). Therefore, an embodiment herein provides a modified betacoronavirus S protein or fragment thereof comprising a glycine (G) at the position corresponding to residue 614 of the sequence SEQ ID NO: 3 (see, e.g., the S protein fragment sequence SEQ ID NO: 4). A particular embodiment provides a modified SARS-CoV-2 S protein or fragment thereof comprising a glycine (G) at the position corresponding to residue 614 of the sequence SEQ ID NO: 3 (see, e.g., the S protein fragment sequence SEQ ID NO: 4).

[0367] Generally, there exists an inverse relationship between the flexibility of a protein and the stability of that protein (as was recently shown for the Lipase A enzyme from the mesophilic organism Bacillus subtilis, see Rathi et al., 2015 PLOS ONE 19(7): e0130289; DOI: 10.1371/journal.pone.0130289; 24 pages). One may reduce protein flexibility, and thereby increase stability, by modifying the protein's structure such as by introducing one or more mutations into the protein's amino acid sequence. Increased stability of antigens has been previously linked with improved immunogenicity such as, for example, for the pre-fusion conformation of the Respiratory Syncytial Virus (RSV) fusion protein (McLellan et al. 2013 Science 342(6158): 592-598) and the Neisseria meningitidis factor H binding protein (fHbp) (Rossi et al. 2016 Infect. Immun. 84(6): 1735-1742). Certain stabilizing mutations of a SARS-CoV-2 Spike protein have been suggested (See McCallum et al. 2020 bioRxiv HyperTextTransferProtocolSecure://doi.org/10/1101/2020.06.03.129817; Henderson et al. 2020 bioRxiv HyperTextTransferProtocolSecure://doi.org/10.1101/2020.05.18.102087). It is expected that improved stability of a betacoronavirus S protein or fragment thereof will have a desirable impact on protein preparation and production (e.g., manufacturing processes) and/or on immunogenicity. It is therefore desirable that in certain embodiments, the betacoronavirus S protein sequence, or fragment thereof, comprises one or more stabilizing mutations (such as one or more of the HBNet, PROSS, HBNet-PROSS, or Disulfide Bridge mutations provided in the Examples). In certain embodiments is provided a modified betacoronavirus S protein or fragment thereof comprising one or more of the mutations listed in Tables 1-5. See also SEQ ID NOs: 5-64. In certain embodiments is provided a modified betacoronavirus S protein, or fragment thereof, comprising an amino acid sequence that comprises one or more of the mutations listed in Tables 1-5 and wherein the modified S protein, or fragment thereof, has an increased stability as compared to a wild type (e.g., the S protein comprising the sequence SEQ ID NO: 3) or control (e.g., the S protein comprising the sequence SEQ ID NO: 4) betacoronavirus S protein.

[0368] In the context of vaccine design, antibody-dependent enhancement (ADE) of viral infection or disease is a concern (see Tirado and Yoon 2003 Viral Immunol. 16(1):69-86). ADE has been observed for coronaviruses (Wan et al. 2020 94(5):e02015-19, 15 pages; Walls et al. 2019 Cell 176:1026-1039). One approach to reduce the risk of ADE in the context of vaccination by delivering an antigen to a subject, is to introduce receptor binding mutations (as defined herein above) into the antigen sequence. Where the antigen is a modified betacoronavirus S protein or fragment thereof, wherein its wild type counterpart binds hACE2 as receptor (e.g., hCoV-NL63, SARS-CoV-1, and/or SARS-CoV-2), it may therefore be desirable for the antigen sequence to comprise one or more receptor binding mutations (e.g., receptor binding knock-down mutations, receptor binding knock-out mutations, or receptor binding glycan mutations) to avoid eliciting antibodies that are comparable to hACE2 and thereby avoid, for example, enhancing the possibility of triggering conformational changes from pre- to post-fusion S protein during the course of natural SARS-β, BCoV infection. The RBDs of at least SARS-CoV-1 and SARS-CoV-2 have already been characterized and compared, providing identification of corresponding residues (Tai et al. 2020 Cell. & Mol. Imm. at FIG. 1, available before print HyperTextTransferProtocolSecure: //doi.org/10.1038/s41423-020-0400-4). Certain substitution mutations of the SARS-CoV-2 S protein RBD are provided herein (see the knock-out mutations at Example 2, Table 6 and glycan mutations at Example 2, Table 7), so certain embodiments provide a modified betacoronavirus S protein or fragment thereof (e.g., hCoV-NL63, SARS-CoV-1, and/or SARS-CoV-2 S protein or fragment thereof) with an amino acid sequence comprising an “RBD mutation” residue listed in column #2 of Table 6 at a position corresponding to the residue number in column #1 (“Target Residue in SEQ ID NO: 3”) of that same row in Table 6. Optionally one such modified betacoronavirus S protein or fragment has an amino acid sequence comprising one of SEQ ID NOs: 65-104, optionally wherein the S protein or fragment comprises a transmembrane domain or both a transmembrane domain and a cytoplasmic tail (such as a full length, modified betacoronavirus S protein).

[0369] Optionally, to facilitate expression and recovery, the modified spike protein or fragment sequence may include a signal peptide at the N-terminus. A signal peptide can be selected from among numerous signal peptides known in the art, and is typically chosen to facilitate production and processing in a system selected for recombinant expression. In one embodiment, the signal peptide is the one naturally present in the native viral spike protein (see, e.g., the summary of SEQ ID NO: 1 herein below). In another embodiment, the signal peptide is a Gaussian Luciferase signal sequence, a human CD5 signal sequence, a human CD33 signal sequence, a human IL2 signal sequence, a human IgE signal sequence, a human Light Chain Kappa signal sequence, a JEV short signal sequence, a JEV long signal sequence, a Mouse Light Chain Kappa signal sequence, a SSP signal sequence, or a Gaussian Luciferase (AKP). As used herein, a “mature” sequence means it lacks the N-terminal signal sequence (signal peptide).

[0370] A modified betacoronavirus S protein or S protein fragment amino acid sequence may comprise heterologous amino acid residues, such as one or more tags to facilitate detection (e.g. an epitope tag for detection by monoclonal antibodies) and/or purification (e.g. a polyhistidine-tag to allow purification on a nickel-chelating resin) of the protein or fragment. In a certain embodiment, the protein or fragment sequence further comprises a cleavable linker. A cleavable linker allows for the tag to be separated from the S protein or S protein fragment, for example, by the addition of an agent capable of cleaving the linker. A number of different cleavable linkers are known to those of skill in the art. In certain embodiments it may thus be necessary to truncate the ectodomain, so certain embodiments provide a modified betacoronavirus S protein fragment having a truncated, function ectodomain that lacks 1, 2, 3, 4, 5, 6, 7, 8, 9, 10, 11, 12, 13, 14, 15, 16, 17, 18, 19 or 20 amino acid residues of the natural ectodomain.

[0371] A polypeptide with an inactive transmembrane domain (e.g., inactive by having a truncated TM domain (“TM-truncated”, such as a deleted TM domain “TM-deleted”) cannot reside within a lipid bilayer and may, therefore, be more easily purified and at higher yield. Especially in the context of a subunit vaccination approach, it may be desirable to increase the solubility of a betacoronavirus S protein or S protein fragment by, for example, providing a TM-inactive (e.g., TM-truncated or TM-deleted) betacoronavirus S protein fragment. In certain embodiments is provided a TM-truncated betacoronavirus S protein fragment that is operably linked at its C-terminus to a heterologous amino acid sequence (such as a cytoplasmic tail (CT)). In certain embodiments is provided a betacoronavirus S protein fragment consisting of 0, 1, 2, 3, 4, 5, 6, 7, 8, 9 or 10 amino acids of the natural TM domain. For a DNA- or RNA-based vaccine approach to delivering proteins whose wild type counterparts are cell-membrane bound, it would be undesirable to inactivate the protein's transmembrane domain.

[0372] In certain embodiments is provided a betacoronavirus S protein fragment with a truncated cytoplasmic domain. In certain embodiments is provided a betacoronavirus S protein fragment consisting of 0, 1, 2, 3, 4, 5, 6, 7, 8, 9 or 10 amino acids of the natural cytoplasmic domain.

[0373] In certain embodiments is provided a purified or isolated, modified betacoronavirus S protein or fragment thereof. In certain embodiments is provided a purified or isolated, modified MERS-CoV, SARS-CoV-1, or SARS-CoV2 S protein or fragment thereof. In certain other embodiments is provided a purified or isolated, modified SARS-β, BCoV S protein or fragment thereof (such as a purified or isolated, modified SARS-CoV-1 SARS-CoV-2 S protein or fragment thereof).

[0374] It would be well understood that amino acid sequences for use in, for example, transient expression (such as those for use in preclinical studies) may be modified to make them suitable for stable expression (in advance of clinical studies, for example). Techniques for making an amino acid sequence more suitable for stable expression includes, for example, the removal of purification tags, amino acid substitution or deletion (e.g., in the ectodomain) to reduce C-terminal heterogeneity, as well as the deletion of hydrophobic residues (e.g., in the ectodomain) to increase solubility. Application of these techniques to the presently provided betacoronavirus S protein or S protein fragment sequences is envisaged.

[0375] In certain embodiments is provided a modified betacoronavirus S protein, or fragment thereof, that has an amino acid sequence with at least 80%, 81%, 82%, 83%, 84%, 85%, 86%, 87%, 88%, 89%, 90%, 91%, 92%, 93%, 94%, 95%, 96%, 97%, 98%, 99%, or 100% sequence identity to a sequence selected from the group consisting of SEQ ID NOs: 5-114 (or also to SEQ ID NOs 125-134). In certain embodiments is provided a polynucleotide encoding a modified betacoronavirus S protein, or fragment thereof, that has an amino acid sequence with at least 80%, 81%, 82%, 83%, 84%, 85%, 86%, 87%, 88%, 89%, 90%, 91%, 92%, 93%, 94%, 95%, 96%, 97%, 98%, 99%, or 100% sequence identity to a sequence selected from the group consisting of SEQ ID NOs: 5-114 (or also to SEQ ID NOs 125-134).

[0376] In certain embodiments is provided a modified betacoronavirus S protein, or fragment thereof, that has an amino acid sequence with at least 80%, 81%, 82%, 83%, 84%, 85%, 86%, 87%, 88%, 89%, 90%, 91%, 92%, 93%, 94%, 95%, 96%, 97%, 98%, 99%, or 100% sequence identity to a sequence selected from the group consisting of SEQ ID NOs: 5-64 (or also to SEQ ID NOs 125-134). In certain embodiments is provided a polynucleotide encoding a modified betacoronavirus S protein, or fragment thereof, that has an amino acid sequence with at least 80%, 81%, 82%, 83%, 84%, 85%, 86%, 87%, 88%, 89%, 90%, 91%, 92%, 93%, 94%, 95%, 96%, 97%, 98%, 99%, or 100% sequence identity to a sequence selected from the group consisting of SEQ ID NOs: 5-64 (or also to SEQ ID NOs 125-134).

[0377] In certain embodiments is provided a modified betacoronavirus S protein, or fragment thereof, that has an amino acid sequence with at least 80%, 81%, 82%, 83%, 84%, 85%, 86%, 87%, 88%, 89%, 90%, 91%, 92%, 93%, 94%, 95%, 96%, 97%, 98%, 99%, or 100% sequence identity to a sequence selected from the group consisting of SEQ ID NOs: 65-114 (or also to SEQ ID NOs 125-134). In certain embodiments is provided a polynucleotide encoding a modified betacoronavirus S protein, or fragment thereof, that has an amino acid sequence with at least 80%, 81%, 82%, 83%, 84%, 85%, 86%, 87%, 88%, 89%, 90%, 91%, 92%, 93%, 94%, 95%, 96%, 97%, 98%, 99%, or 100% sequence identity to a sequence selected from the group consisting of SEQ ID NOs: 65-114 (or also to SEQ ID NOs 125-134).

[0378] In certain embodiments is provided a modified betacoronavirus S protein, or fragment thereof, that has an amino acid sequence with at least 80%, 81%, 82%, 83%, 84%, 85%, 86%, 87%, 88%, 89%, 90%, 91%, 92%, 93%, 94%, 95%, 96%, 97%, 98%, 99%, or 100% sequence identity to a sequence selected from the group consisting of SEQ ID NOs: 65-104 (or also to SEQ ID NOs 125-134). In certain embodiments is provided a polynucleotide encoding a modified betacoronavirus S protein, or fragment thereof, that has an amino acid sequence with at least 80%, 81%, 82%, 83%, 84%, 85%, 86%, 87%, 88%, 89%, 90%, 91%, 92%, 93%, 94%, 95%, 96%, 97%, 98%, 99%, or 100% sequence identity to a sequence selected from the group consisting of SEQ ID NOs: 65-104 (or also to SEQ ID NOs 125-134).

[0379] In certain embodiments is provided a modified betacoronavirus S protein, or fragment thereof, that has an amino acid sequence with at least 80%, 81%, 82%, 83%, 84%, 85%, 86%, 87%, 88%, 89%, 90%, 91%, 92%, 93%, 94%, 95%, 96%, 97%, 98%, 99%, or 100% sequence identity to a sequence selected from the group consisting of SEQ ID NOs: 105-114 (or also to SEQ ID NOs 125-134). In certain embodiments is provided a polynucleotide encoding a modified betacoronavirus S protein, or fragment thereof, that has an amino acid sequence with at least 80%, 81%, 82%, 83%, 84%, 85%, 86%, 87%, 88%, 89%, 90%, 91%, 92%, 93%, 94%, 95%, 96%, 97%, 98%, 99%, or 100% sequence identity to a sequence selected from the group consisting of SEQ ID NOs: 105-114 (or also to SEQ ID NOs 125-134).

[0380] If desired, the modified betacoronavirus S protein or fragment thereof (or polynucleotide sequence encoding it such as the self-replicating RNA molecule) can be screened or analyzed to confirm their therapeutic and prophylactic properties using various in vitro or in vivo testing methods that are known to those of skill in the art. For example, they can be tested for their effect on induction of proliferation or effector function of the particular lymphocyte type of interest, e.g., B cells, T cells, T cell lines, and T cell clones. For example, spleen cells from immunized mice can be isolated and the capacity of cytotoxic T lymphocytes to lyse autologous target cells that contain a polynucleotide (e.g., a self-replicating RNA molecule) that encodes the modified betacoronavirus S protein or S protein fragment. In addition, T helper cell differentiation can be analyzed by measuring proliferation or production of TH1 (IL-2, TNF-α, or IFN-γ) cytokines and/or TH2 (IL-4 or IL-5) cytokines by ELISA or directly in CD4+ T cells by cytoplasmic cytokine staining and flow cytometry.

[0381] Self-replicating RNA molecules that encode a modified betacoronavirus S protein or S protein fragment can also be tested for ability to induce humoral immune responses, as evidenced, for example, by induction of B cell production of antibodies specific for a modified betacoronavirus S protein or S protein fragment of interest. These assays can be conducted using, for example, peripheral B lymphocytes from immunized individuals. Such assay methods are known to those of skill in the art. Other assays that can be used to characterize the self-replicating RNA molecules can involve detecting expression of the encoded modified betacoronavirus S protein or S protein fragment by the target cells. For example, FACS can be used to detect antigen expression on the cell surface or intracellularly. Another advantage of FACS selection is that one can sort for different levels of expression; sometimes-lower expression may be desired. Other suitable method for identifying cells which express a particular antigen involve panning using monoclonal antibodies on a plate or capture using magnetic beads coated with monoclonal antibodies.

[0382] An immunogenic composition for use herein delivers 1 to 100 μg of betacoronavirus S protein or S protein fragment per dose (e.g., per human dose)—1 to 100 μg being the total amount of all betacoronavirus S proteins or S protein fragments delivered to the subject (e.g., if the composition comprises a mix of S protein sequences having/encoding variable structures such as one or more being the modified betacoronavirus S proteins or S protein fragments provided herein). For example, an immunogenic composition may deliver about 25 μg (such as 22.5-27.5 μg) or about 50 μg (such as 45-55 μg) of betacoronavirus S protein or S protein fragment. For administration of an immunogenic composition, two or more doses of the immunogenic composition may be administered so that the total dose of betacoronavirus S protein or S protein fragment delivered is 1 to 100 μg per dose (e.g., human dose) (such as about 25 μg (such as 22.5-27.5 μg) or about 50 μg (such as 45-55 μg) of betacoronavirus S protein or S protein fragment). Especially in a subunit approach, a suitable amount of betacoronavirus S protein or S protein fragment protein is, for example, 1 to 100 μg (w/v) per dose (e.g., human dose) of the immunogenic composition; such as about 25 μg or about 50 μg of betacoronavirus S protein or S protein fragment protein (w/v) per human dose of the immunogenic composition (for example, 22.5-27.5 μg or 45-55 μg of betacoronavirus S protein or S protein fragment (w/v) per human dose of the immunogenic composition).

### Adjuvant

[0383] Adjuvants are included in vaccines to improve humoral and cellular immune responses, particularly in the case of poorly immunogenic subunit vaccines. Similar to natural infections by pathogens, adjuvants rely on the activation of the innate immune system to promote long-lasting adaptive immunity and in particular to (1) increase the immunogenicity of weak antigens; (2) enhance the speed and duration of the immune response; (3) modulate antibody avidity, specificity, isotype or subclass distribution; (4) stimulate cell mediated immunity; (5) promote the induction of mucosal immunity; (6) enhance immune responses in immunologically immature or senescent individuals; (7) decrease the dose of antigen in the vaccine and/or (8) help to overcome antigen competition in combination vaccines (Rajuput et al. Adjuvant effects of saponins on animal immune responses 2007 J Zhejiang Univ Sci. B. 8(3):153-161). Adjuvants can deeply influence the quality of an immune response, and therefore, their selection may be fundamental in a vaccine formulation.

[0384] Adjuvants are classified according to the source of their constituents, their physiochemical properties, or their mechanism of action and are generally grouped into two subheadings: molecular adjuvants (including genetic adjuvants) that act directly on the immune system to enhance immune response against antigen(s) (e.g., TLR ligands, cytokines, plasmids expressing cytokines, chemokines, saponins, and bacterial exotoxins) and carrier systems that promote antigen(s) in the most appropriate way to the immune system while also exhibiting controlled release and depot effects, thereby increasing the immune response (e.g., mineral salts, emulsions, liposomes, virosomes, biodegradable polymer micro/nano particles and immune stimulating complexes-ISCOMS). Gulce-Iz and Saglam-Metiner April 2019 “Current State of the Art in DNA Vaccine Delivery and Molecular Adjuvants: Bcl-xL Anti-Apoptotic Protein as a Molecular Adjuvant” in IMMUNE RESPONSE ACTIVATION AND IMMUNOMODULATION DOI:10.5772/intechopen.82203. In certain embodiments, the presently provided immunogenic composition comprises an adjuvant. Examples of suitable adjuvants include but are not limited to inorganic adjuvants (e.g. inorganic metal salts such as aluminium phosphate or aluminium hydroxide), organic adjuvants (e.g. saponins, such as QS21, or squalene), oil-based adjuvants (e.g. Freund's complete adjuvant and Freund's incomplete adjuvant), oil-in-water emulsions, cytokines (e.g. IL-1β, IL-2, IL-7, IL-12, IL-18, GM-CFS, and INF-γ) particulate adjuvants (e.g. immuno-stimulatory complexes (ISCOMS), liposomes, or biodegradable microspheres), virosomes, bacterial adjuvants (e.g. monophosphoryl lipid A, such as 3-de-O-acylated monophosphoryl lipid A (3D-MPL), or muramyl peptides), synthetic adjuvants (e.g. non-ionic block copolymers, muramyl peptide analogues, or synthetic lipid A), synthetic polynucleotides adjuvants (e.g polyarginine or polylysine), Toll-like receptor (TLR) agonists (including TLR-1, TLR-2, TLR-3, TLR-4, TLR-5, TLR-6, TLR-7, TLR-8 and TLR-9 agonists) and immunostimulatory oligonucleotides containing unmethylated CpG dinucleotides (“CpG”).

[0385] In a preferred embodiment, the adjuvant comprises a TLR agonist and/or an immunologically active saponin. Preferably still, the adjuvant may comprise or consist of a TLR agonist and a saponin in a liposomal formulation. The ratio of TLR agonist to saponin may be 5:1, 4:1, 3:1, 2:1 or 1:1.

[0386] The use of TLR agonists in adjuvants is well-known in art and has been reviewed e.g. by Lahiri et al. (2008) Vaccine 26:6777. TLRs that can be stimulated to achieve an adjuvant effect include TLR2, TLR4, TLR5, TLR7, TLR8 and TLR9. TLR2, TLR4, TLR7 and TLR8 agonists, particularly TLR4 agonists, are preferred.

[0387] Suitable TLR4 agonists include lipopolysaccharides, such as monophosphoryl lipid A (MPL) and 3-O-deacylated monophosphoryl lipid A (3D-MPL). U.S. Pat. No. 4,436,727 discloses MPL and its manufacture. U.S. Pat. No. 4,912,094 and reexamination certificate B1 4,912,094 discloses 3D-MPL and a method for its manufacture. Another TLR4 agonist is glucopyranosyl lipid adjuvant (GLA), a synthetic lipid A-like molecule (see, e.g. Fox et al. (2012) Clin. Vaccine Immunol 19:1633). In a further embodiment, the TLR4 agonist may be a synthetic TLR4 agonist such as a synthetic disaccharide molecule, similar in structure to MPL and 3D-MPL or may be synthetic monosaccharide molecules, such as the aminoalkyl glucosaminide phosphate (AGP) compounds disclosed in, for example, WO9850399, WO0134617, WO0212258, WO3065806, WO04062599, WO06016997, WO0612425, WO03066065, and WO0190129. Such molecules have also been described in the scientific and patent literature as lipid A mimetics. Lipid A mimetics suitably share some functional and/or structural activity with lipid A, and in one aspect are recognised by TLR4 receptors. AGPs as described herein are sometimes referred to as lipid A mimetics in the art. In a preferred embodiment, the TLR4 agonist is 3D-MPL.TLR4 agonists, such as 3-O-deacylated monophosphoryl lipid A (3D-MPL), and their use as adjuvants in vaccines has e.g. been described in WO 96/33739 and WO2007/068907 and reviewed in Alving et al. (2012) Curr Opin in Immunol 24:310.

[0388] Suitably, the adjuvant comprises an immunologically active saponin, such as an immunologically active saponin fraction, such as QS21.

[0389] Adjuvants comprising saponins have been described in the art. Saponins are described in: Lacaille-Dubois and Wagner (1996) A review of the biological and pharmacological activities of saponins, Phytomedicine vol 2:363. Saponins are known as adjuvants in vaccines. For example, Quil A (derived from the bark of the South American tree Quillaja Saponaria Molina), was described by Dalsgaard et al. in 1974 (“Saponin adjuvants”, Archiv. fur die gesamte Virusforschung, Vol. 44, Springer Verlag, Berlin, 243) to have adjuvant activity. Purified fractions of Quil A have been isolated by HPLC which retain adjuvant activity without the toxicity associated with Quil A (Kensil et al. (1991) J. Immunol. 146: 431). Quil A fractions are also described in U.S. Pat. No. 5,057,540 and “Saponins as vaccine adjuvants”, Kensil, C. R., Crit Rev Ther Drug Carrier Syst, 1996, 12 (1-2):1-55.

[0390] Two Quil A such fractions, suitable for use in the present invention, are QS7 and QS21 (also known as QA-7 and QA-21). QS21 is a preferred immunologically active saponin fraction for use in the present invention. QS21 has been reviewed in Kensil (2000) In O'Hagan: Vaccine Adjuvants: preparation methods and research protocols, Homana Press, Totowa, N.J., Chapter 15. Particulate adjuvant systems comprising fractions of Quil A, such as QS21 and QS7, are e.g. described in WO 96/33739, WO 96/11711 and WO2007/068907.

[0391] In addition to the other components, the adjuvant preferably comprises a sterol. The presence of a sterol may further reduce reactogenicity of compositions comprising saponins, see e.g. EP0822831. Suitable sterols include beta-sitosterol, stigmasterol, ergosterol, ergocalciferol and cholesterol. Cholesterol is particularly suitable. Suitably, the immunologically active saponin fraction is QS21 and the ratio of QS21:sterol is from 1:100 to 1:1 (w/w), suitably between 1:10 to 1:1 (w/w), and preferably 1:5 to 1:1 (w/w). Suitably excess sterol is present, the ratio of QS21:sterol being at least 1:2 (w/w). In one embodiment, the ratio of QS21:sterol is 1:5 (w/w). The sterol is suitably cholesterol.

[0392] In a preferred embodiment, the adjuvant comprises a TLR4 agonist and an immunologically active saponin. In a more preferred embodiment, the TLR4 agonist is 3D-MPL and the immunologically active saponin is QS21.

[0393] In some embodiments, the adjuvant is presented in the form of an oil-in-water emulsion, e.g. comprising squalene, alpha-tocopherol and a surfactant (see e.g. WO95/17210) or in the form of a liposome. A liposomal presentation is preferred.

[0394] The term “liposome” when used herein refers to uni- or multilamellar (particularly 2, 3, 4, 5, 6, 7, 8, 9, or 10 lamellar depending on the number of lipid membranes formed) lipid structures enclosing an aqueous interior. Liposomes and liposome formulations are well known in the art. Liposomal presentations are e.g. described in WO 96/33739 and WO2007/068907. Lipids which are capable of forming liposomes include all substances having fatty or fat-like properties. Lipids which can make up the lipids in the liposomes may be selected from the group comprising glycerides, glycerophospholipids, glycerophospholipids, glycerophospholipids, sulfolipids, sphingolipids, phospholipids, isoprenolides, steroids, stearines, sterols, archeolipids, synthetic cationic lipids and carbohydrate containing lipids. In a particular embodiment of the invention the liposomes comprise a phospholipid. Suitable phospholipids include (but are not limited to): phosphocholine (PC) which is an intermediate in the synthesis of phosphatidylcholine; natural phospholipid derivates: egg phosphocholine, egg phosphocholine, soy phosphocholine, hydrogenated soy phosphocholine, sphingomyelin as natural phospholipids; and synthetic phospholipid derivates: phosphocholine (didecanoyl-L-a-phosphatidylcholine [DDPC], dilauroylphosphatidylcholine [DLPC], dimyristoylphosphatidylcholine [DMPC], dipalmitoyl phosphatidylcholine [DPPC], Distearoyl phosphatidylcholine [DSPC], Dioleoyl phosphatidylcholine, [DOPC], 1-palmitoyl, 2-oleoylphosphatidylcholine [POPC], Dielaidoyl phosphatidylcholine [DEPC]), phosphoglycerol (1,2-Dimyristoyl-sn-glycero-3-phosphoglycerol [DMPG], 1,2-dipalmitoyl-sn-glycero-3-phosphoglycerol [DPPG], 1,2-distearoyl-sn-glycero-3-phosphoglycerol [DSPG], 1-palmitoyl-2-oleoyl-sn-glycero-3-phosphoglycerol [POPG]), phosphatidic acid (1,2-dimyristoyl-sn-glycero-3-phosphatidic acid [DMPA], dipalmitoyl phosphatidic acid [DPPA], distearoyl-phosphatidic acid [DSPA]), phosphoethanolamine (1,2-dimyristoyl-sn-glycero-3-phosphoethanolamine [DMPE], 1,2-Dipalmitoyl-sn-glycero-3-phosphoethanolamine [DPPE], 1,2-distearoyl-sn-glycero-3-phosphoethanolamine [DSPE], 1,2-Dioleoyl-sn-Glycero-3-Phosphoethanolamine [DOPE]), phosphoserine, polyethylene glycol [PEG] phospholipid.

[0395] Liposome size may vary from 30 nm to several μm depending on the phospholipid composition and the method used for their preparation. In particular embodiments of the invention, the liposome size will be in the range of 50 nm to 500 nm and in further embodiments 50 nm to 200 nm. Dynamic laser light scattering is a method used to measure the size of liposomes well known to those skilled in the art.

[0396] In a particularly suitable embodiment, liposomes used in the invention comprise DOPC and a sterol, in particular cholesterol. Thus, in a particular embodiment, compositions of the invention comprise QS21 in any amount described herein in the form of a liposome, wherein said liposome comprises DOPC and a sterol, in particular cholesterol.

[0397] In a more preferred embodiment, the adjuvant comprises a 3D-MPL and QS21 in a liposomal formulation.

[0398] In one embodiment, the adjuvant comprises between 25 and 75, such as between 35 and 65 micrograms (for example about or exactly 50 micrograms) of 3D-MPL and between 25 and 75, such as between 35 and 65 (for example about or exactly 50 micrograms) of QS21 in a liposomal formulation.

[0399] In another embodiment, the adjuvant comprises between 12.5 and 37.5, such as between 20 and 30 micrograms (for example about or exactly 25 micrograms) of 3D-MPL and between 12.5 and 37.5, such as between 20 and 30 micrograms (for example about or exactly 25 micrograms) of QS21 in a liposomal formulation.

[0400] In another embodiment of the present invention, the adjuvant comprises or consists of an oil-in-water emulsion. Suitably, an oil-in-water emulsion comprises a metabolisable oil and an emulsifying agent. A particularly suitable metabolisable oil is squalene. Squalene (2,6,10,15,19,23-Hexamethyl-2,6,10,14,18,22-tetracosahexaene) is an unsaturated oil which is found in large quantities in shark-liver oil, and in lower quantities in olive oil, wheat germ oil, rice bran oil, and yeast. In one embodiment, the metabolisable oil is present in the immunogenic composition in an amount of 0.5% to 10% (v/v) of the total volume of the composition. A particularly suitable emulsifying agent is polyoxyethylene sorbitan monooleate (POLYSORBATE 80 or TWEEN 80). In one embodiment, the emulsifying agent is present in the immunogenic composition in an amount of 0.125 to 4% (v/v) of the total volume of the composition. The oil-in-water emulsion may optionally comprise a tocol. Tocols are well known in the art and are described in EP0382271 B1. Suitably, the tocol may be alpha-tocopherol or a derivative thereof such as alpha-tocopherol succinate (also known as vitamin E succinate). In one embodiment, the tocol is present in the adjuvant composition in an amount of 0.25% to 10% (v/v) of the total volume of the immunogenic composition. The oil-in-water emulsion may also optionally comprise sorbitan trioleate (SPAN 85).

[0401] In an oil-in-water emulsion, the oil and emulsifier should be in an aqueous carrier. The aqueous carrier may be, for example, phosphate buffered saline or citrate.

[0402] In the context of betacoronavirus vaccine candidates, certain adjuvants may be preferred including an adjuvant that comprises MF59, AS03 (e.g., AS03(A)), AS04, aluminum hydroxide, potassium aluminum phosphate (alum), a TLR agonist (e.g., a TLR3 agonist such as polyriboinosinic acid (poly I:C) (including alum and poly IC) or polyadenylic-polyuridylic acid (poly(A:U)); a TLR4 agonist such as lipopolysaccharide (LPS); or a TLR7 agonist such as polyuridylic acid (polyU)), cysteine-phosphate-guanine (CpG) oligodeoxynucleotides (ODN) (including alum and CpG ODN), delta inulin microparticle-based, a biphosphonate, melatonin (N-acetyl-5-methoxytryptamine), Monophosphoryl Lipid A, a water-in-oil emulsion such as MONTANIDE ISA 51 (or “ISA 51”) or a saponin adjuvant (e.g., an adjuvant comprising Quillaja saponins such as MATRIX-M or AS01 (e.g., AS01(B)).

[0403] In particular, the oil-in-water emulsion systems used in the present invention have a small oil droplet size in the sub-micron range. Suitably the droplet sizes will be in the range 120 to 750 nm, more particularly sizes from 120 to 600 nm in diameter. Even more particularly, the oil-in water emulsion contains oil droplets of which at least 70% by intensity are less than 500 nm in diameter, more particular at least 80% by intensity are less than 300 nm in diameter, more particular at least 90% by intensity are in the range of 120 to 200 nm in diameter.

[0404] It will be understood that the modified betacoronavirus S protein, immunogenic fragment thereof, or its encoding polynucleotide may be stored separately from the adjuvant and admixed with the adjuvant prior to administration (ex tempo) to a subject. The modified betacoronavirus S protein, immunogenic fragment thereof, or its encoding polynucleotide and the adjuvant may also be administered separately, but concomitantly, to a subject.

[0405] In one aspect, there is provided a kit comprising or consisting of a modified betacoronavirus S protein, or immunogenic fragment thereof, as described herein and an adjuvant.

[0406] Where the adjuvant is in a liquid form to be combined with a liquid form of an antigen composition, the adjuvant composition will be in a human-dose-suitable volume which is approximately half of the intended final volume of the human dose, for example a 360 μl volume for an intended human dose of 0.7 ml, or a 250 μl volume for an intended human dose of 0.5 ml. The adjuvant composition is diluted when combined with the antigen composition to provide the final human dose of vaccine. The final volume of such dose will of course vary dependent on the initial volume of the adjuvant composition and the volume of antigen composition added to the adjuvant composition. Alternatively, liquid adjuvant is used to reconstitute a lyophilised antigen composition. In such cases, the human dose suitable volume of the adjuvant composition is approximately equal to the final volume of the human dose. The liquid adjuvant composition is added to the vial containing the lyophilised antigen composition.

[0407] The final human dose can vary between, for example, 0.25 to 1.5 ml.

### Expression Methods

[0408] The polypeptides may be produced by any suitable means, including by recombinant expression production or by chemical synthesis. Polypeptides may be recombinantly expressed and purified using any suitable method as is known in the art, and the product characterized using methods as known in the art, e.g., by Nano-Differential Scanning Fluorimetry (Nano-DSF), Surface Plasmon Resonance (SPR), and Electron Microscopy, to confirm the polypeptides of the present invention form correct conformation.

[0409] The method comprises the steps of (a) culturing a recombinant host cell under conditions conducive to the expression of the polypeptide. The method may further comprise recovering, isolating, or purifying the expressed polypeptide. In one embodiment, multiple copies of a subunit polypeptide are expressed in a host cell, where every three of the subunit polypeptides forms homogeneous trimer of polypeptides within the host cell. The formed trimer of polypeptides can then be recovered, isolated or purified from the cell or the culture medium in which the cell is grown.

[0410] The expressed polypeptide may include a linker peptide and a purification tag. Various expression systems are known, including those using human (e.g., HeLa) host cells, mammalian (e.g., Chinese Hamster Ovary (CHO)) host cells, prokaryotic host cells (e.g., E. coli), or insect host cells. The host cell is typically transformed with the recombinant nucleic acid sequence encoding the desired polypeptide product, cultured under conditions suitable for expression of the product. The expressed product may be purified from the cell or culture medium. Cell culture conditions are particular to the cell type and expression vector.

[0411] When a recombinant host cell of the present invention is cultured under suitable conditions, the recombinant nucleic acid expresses a subunit polypeptide as described herein. The polypeptide can form polypeptide trimer within the cell. Suitable host cells include, for example, insect cells (e.g., Aedes aegypti, Autographa californica, Bombyx mori, Drosophila melanogaster, Spodoptera frugiperda, and Trichoplusia ni), mammalian cells (e.g., human, non-human primate, horse, cow, sheep, dog, cat, and rodent (e.g., hamster)), avian cells (e.g., chicken, duck, and geese), bacteria (e.g., E. coli, Bacillus subtilis, and Streptococcus spp.), yeast cells (e.g., Saccharomyces cerevisiae, Candida albicans, Candida maltosa, Hansenual polymorpha, Kluyveromyces fragilis, Kluyveromyces lactis, Pichia guillerimondii, Pichia pastoris, Schizosaccharomyces pombe and Yarrowia lipolytica), Tetrahymena cells (e.g., Tetrahymena thermophila) or combinations thereof.

[0412] Host cells can be cultured in conventional nutrient media modified as appropriate and as will be apparent to those skilled in the art (e.g., for activating promoters). Culture conditions, such as temperature, pH and the like, may be determined using knowledge in the art, see e.g., Freshney (1994) Culture of Animal Cells, a Manual of Basic Technique, third edition, Wiley-Liss, New York and the references cited therein. In bacterial host cell systems, a number of expression vectors are available including, but not limited to, multifunctional E. coli cloning and expression vectors such as BLUESCRIPT (Stratagene) or pET vectors (Novagen, Madison Wis.). In mammalian host cell systems, a number of expression systems, including both plasmids and viral-based systems, are available commercially.

[0413] Eukaryotic or microbial host cells expressing polypeptides of the invention can be disrupted by any convenient method (including freeze-thaw cycling, sonication, mechanical disruption), and polypeptides can be recovered and purified from recombinant cell culture by any suitable method known in the art (including ammonium sulfate or ethanol precipitation, acid extraction, anion or cation exchange chromatography, phosphocellulose chromatography, hydrophobic interaction chromatography, affinity chromatography (e.g., using any of the tagging systems noted herein), hydroxyapatite chromatography, and lectin chromatography). Size Exclusion Chromatography (SEC) can be employed in the final purification steps.

[0414] In general, expression of a recombinantly encoded polypeptide of the present invention involves preparation of an expression vector comprising a recombinant polynucleotide under the control of one or more promoters, such that the promoter stimulates transcription of the polynucleotide and promotes expression of the encoded polypeptide. “Recombinant Expression” as used herein refers to such a method.

[0415] In a further aspect, the present invention provides recombinant expression vectors comprising a recombinant nucleic acid sequence of any embodiment of the invention operatively linked to a suitable control sequence. “Recombinant expression vector” includes vectors that operatively link a nucleic acid coding region or gene to any control sequences capable of effecting expression of the gene product. “Control sequences” are nucleic acid sequences capable of effecting the expression of the nucleic acid molecules and need not be contiguous with the nucleic acid sequences, so long as they function to direct the expression thereof. Recombinant expression ammonium sulfate or ethanol precipitation, acid extraction, anion or cation exchange chromatography, phosphocellulose chromatography, hydrophobic interaction chromatography, affinity chromatography (e.g., using any of the tagging systems noted herein), hydroxyapatite chromatography, and lectin chromatography). Size Exclusion Chromatography (SEC) can be employed in the final purification steps.

[0416] In general, expression of a recombinantly encoded polypeptide of the present invention involves preparation of an expression vector comprising a recombinant polynucleotide under the control of one or more promoters, such that the promoter stimulates transcription of the polynucleotide and promotes expression of the encoded polypeptide. “Recombinant Expression” as used herein refers to such a method.

[0417] In a further aspect, the present invention provides recombinant expression vectors comprising a recombinant nucleic acid sequence of any embodiment of the invention operatively linked to a suitable control sequence. “Recombinant expression vector” includes vectors that operatively link a nucleic acid coding region or gene to any control sequences capable of effecting expression of the gene product. “Control sequences” are nucleic acid sequences capable of effecting the expression of the nucleic acid molecules and need not be contiguous with the nucleic acid sequences, so long as they function to direct the expression thereof. Recombinant expression vectors can be of any type known in the art, including but not limited to plasmid and viral-based expression vectors. The control sequence used to drive expression of the disclosed nucleic acid sequences in a mammalian system may be constitutive or inducible. The construction of expression vectors for use in transfecting prokaryotic cells is also well known. (See, for example, Sambrook, Fritsch, and Maniatis, in: Molecular Cloning, A Laboratory Manual, Cold Spring Harbor Laboratory Press, 1989; Gene Transfer and Expression Protocols, pp. 109-128, ed. E. J. Murray, The Humana Press Inc., Clifton, N.J.), and the Ambion 1998 Catalog (Ambion, Austin, Tex.). The expression vector must be replicable in the selected host organism either as an episome or by integration into host chromosomal DNA. In non-limiting embodiments, the expression vector is a plasmid vector or a viral vector. Expression vectors suitable for use in a given host-expression system and containing the encoding nucleic acid sequence and transcriptional/translational control sequences, may be made by any suitable technique as is known in the art. Typical expression vectors contain suitable promoters, enhancers, and terminators that are useful for regulation of the expression of the coding sequence(s) in the expression construct. The vectors may also comprise selection markers to provide a phenotypic trait for selection of transformed host cells (such as conferring resistance to antibiotics such as ampicillin or neomycin). Nucleic acid or vector modification may be undertaken in a manner known by the art, see e.g., WO 2012/049317 (corresponding to US 2013/0216613) and WO 2016/092460 (corresponding to US 2018/0265551). For example, the nucleic acid sequence encoding an NP subunit polypeptide as described herein is cloned into a vector suitable for introduction into the selected cell system, e.g., bacterial or mammalian cells (e.g., CHO cells). Transformed cells are expanded, e.g., by culturing.

[0418] Suitable host cells can be either prokaryotic or eukaryotic, such as mammalian cells. The cells can be transiently or stably transfected. Such transfection of expression vectors into prokaryotic and eukaryotic cells can be accomplished via any technique known in the art, including but not limited to standard bacterial transformations, calcium phosphateco-precipitation, electroporation, or liposome mediated-, DEAE dextran mediated-, polycationic mediated-, or viral mediated transfection or transduction. (See, for example, Molecular Cloning: A Laboratory Manual (Sambrook, et al., 1989, Cold Spring Harbor Laboratory Press; Culture of Animal Cells: A Manual of Basic Technique, 2.sup.nd Ed. (R. I. Freshney.1987. Liss, Inc. New York, N.Y.).

[0419] The expressed subunit polypeptides forms trimer or other types of oligomer, and could be further recovered (e.g., purified, isolated, or enriched).

### Purification

[0420] The term “purified” as used herein refers to the separation or isolation of a defined product (e.g., a recombinantly expressed polypeptide) from a composition containing other components (e.g., a host cell or host cell medium). A polypeptide composition that has been fractionated to remove undesired components, and which composition retains its biological activity, is considered ‘purified’. ‘Purified’ is a relative term and does not require that the desired product be separated from all traces of other components. Stated another way, “purification” or “purifying” refers to the process of removing undesired components from a composition or host cell or culture. Various methods for use in purifying polypeptides of the present invention are known in the art, e.g., centrifugation, dialysis, affinity or size based chromatography, gel electrophoresis, filtration, precipitation and combinations thereof. The polypeptides of the present invention may be expressed with a tag operable for affinity purification, such as a 6×Histidine tag as is known in the art. A His-tagged polypeptide may be purified using, for example, Ni-NTA column chromatography or using anti-6×His antibody fused to a solid support.

[0421] Thus, the term “purified” does not require absolute purity; rather, it is intended as a relative term. A “substantially pure” preparation of polypeptides or nucleic acid molecules is one in which the desired component represents at least 50% of the total polypeptide (or nucleic acid) content of the preparation. In certain embodiments, a substantially pure preparation will contain at least 60%, at least 70%, at least 80%, at least 85%, at least 90%, at least 95%, at least 97%, at least 98%, or at least 99% or more of the total polypeptide (or nucleic acid) content of the preparation. Methods for quantifying the degree of purification of expressed polypeptides are known in the art and include, for example, assessing the number of polypeptides within a fraction by SDS/PAGE analysis, or assessing the ratio of desired polypeptides to undesired components in final purified product by Size Exclusion Chromatography (SEC).

[0422] Thus, in the sense of the present invention, a “purified” or an “isolated” biological component (such as a polypeptide, or a nucleic acid molecule) has been substantially separated or purified away from other biological components in which the component naturally occurs or was recombinantly produced. The term embraces polypeptides, and nucleic acid molecules prepared by chemical synthesis as well as by recombinant expression in a host cell.

### Biophysical Characterization

[0423] The biophysical property of purified polypeptides may be tested by various means. Herein the biophysical property includes but not limited to thermal stability and antigenicity. Thermal stability refers to the quality of a substance (e.g. the polypeptides of the invention), to resist irreversible change in its chemical or physical structure at a high relative temperature. It could be measured by NanoDSF technique, which detects the changes of intrinsic tryptophan fluorescence caused by unfolding of polypeptide structure. Antigenicity refers to the capacity of polypeptides to bind to specific antibody molecules. A strong binding capacity of polypeptides to a specific antibody usually indicates the structural integrity of the binding site (epitopes) on polypeptide. The antigenicity of a polypeptide can be measured by Surface Plasmon Resonance technology, which is a standard tool for measuring the rate of molecule-molecule association and dissociation. The ratio of dissociation rate to association rate defined as ‘binding affinity’ with unites of picomolar.

### Compositions

### Immunogenic Compositions

[0424] Immunogenic compositions (e.g., vaccine compositions) may be prophylactic (i.e. to prevent disease) or therapeutic (i.e. to lower, reduce, or eliminate the symptoms of a disease). Nonetheless, immunogenic compositions herein elicit an immune response. In certain embodiments is provided an immunogenic composition that elicits a humoral (e.g., a neutralizing antibody response) and/or cellular immune response in a subject and wherein the immune response is comparable to or greater than that of natural immunity.

[0425] Immunogenic compositions herein may be used to, e.g., induce an immune response, but also to, e.g., prevent betacoronavirus infection or reinfection of a subject, reduce betacoronavirus cell entry (e.g., as compared to that of natural infection) or reduce betacoronavirus cell-to-cell spread (e.g., as compared to that of natural infection). Furthermore, immunogenic compositions herein may be used to prevent, or reduce the severity of, betacoronavirus-associated disease (e.g., SARS-CoV-2-associated disease such as COVID-19), such as following delivery of an immunogenic composition to a subject selected for having already been infected (which may be determined by testing the subject's blood for virus-specific antibodies).

[0426] Certain embodiments provide an immunogenic composition comprising a modified betacoronavirus S protein or fragment thereof and one or more adjuvants (e.g., wherein the one or more adjuvants comprises MF59, AS03 [e.g., AS03(A)], AS04, aluminum hydroxide, potassium aluminum phosphate (alum), a TLR agonist [e.g., a TLR3 agonist such as polyriboinosinic acid (poly I:C) (including alum and poly IC) or polyadenylic-polyuridylic acid (poly(A:U)); a TLR4 agonist such as lipopolysaccharide (LPS); or a TLR7 agonist such as polyuridylic acid (polyU)], cysteine-phosphate-guanine (CpG) oligodeoxynucleotides (ODN) (including alum and CpG ODN), delta inulin microparticle-based, a biphosphonate, melatonin (N-acetyl-5-methoxytryptamine), Monophosphoryl Lipid A, a water-in-oil emulsion such as MONTANIDE ISA 51 (or “ISA 51”) or a saponin adjuvant [e.g., an adjuvant comprising Quillaja saponins such as MATRIX-M or AS01 (e.g., AS01(B)]. Immunogenic compositions comprising a nucleic acid that encodes a modified betacoronavirus S protein or fragment thereof can also include an adjuvant.

[0427] The immunogenic compositions herein are not limited to consisting of a modified betacoronavirus S protein or fragment thereof, or a polynucleotide encoding a modified betacoronavirus S protein or fragment thereof; but rather may also comprise other betacoronavirus antigens (optionally a mix of antigens and optionally from a mix of betacoronaviruses such as at least two betacoronavirus antigens optionally wherein the at least two antigens do not originate from the same betacoronavirus but rather originate from at least two of MERS-CoV, SARS-CoV-1, and SARS-CoV-2). In the context of SARS-CoV-2, for example, other antigens may be one or more of N, M, nsp3, nsp4, ORF3s, ORF7a, nsp12, or ORF8. See Grifoni et al. 2020 Cell 181:1-13 and Supplemental Materials. A certain embodiment therefore provides an immunogenic composition comprising a modified betacoronavirus S protein, or fragment thereof, and an N, an M, or both an N and an M protein, or fragment thereof.

[0428] Immunogenic compositions herein may comprise one or more nucleic acid molecules that encode a modified spike protein or fragment thereof (specifically, encode a modified MERS-CoV, SARS-CoV-1, or SARS-CoV-2 spike protein or fragment thereof) such that, following administration to a subject, recombinant modified spike protein or fragment thereof are delivered to a cell of the subject. Exemplary effective amounts of a nucleic acid component can be between 1 ng and 100 μg, such as between 1 ng and 1 μg (e.g., 100 ng-1 μg), or between 1 μg and 100 μg, such as 10 ng, 50 ng, 100 ng, 150 ng, 200 ng, 250 ng, 500 ng, 750 ng, or 1 μg. Effective amounts of a nucleic acid can also include from 1 μg to 500 μg, such as between 1 μg and 200 μg, such as between 10 and 100 μg, for example 1 μg, 2 μg, 5 μg, 10 μg, 20 μg, 50 μg, 75 μg, 100 μg, 150 μg, or 200 μg. Alternatively, an exemplary effective amount of a nucleic acid can be between 100 μg and 1 mg, such as from 100 μg to 500 μg, for example, 100 μg, 150 μg, 200 μg, 250 μg, 300 μg, 400 μg, 500 μg, 600 μg, 700 μg, 800 μg, 900 μg or 1 mg. The nucleic acid molecule encoding a modified betacoronavirus spike protein or fragment thereof (e.g., betacoronavirus, lineage B spike protein or fragment thereof such as MERS-CoV, SARS-CoV-1, or SARS-CoV-2 spike protein or fragment thereof) may be codon optimized. By “codon optimized” is intended modification with respect to codon usage that may increase translation efficacy and/or half-life of the nucleic acid. A poly A tail (e.g., of about 30 adenosine residues or more) may be attached to the 3′ end of the RNA to increase its half-life. The 5′ end of the RNA may be capped with a modified ribonucleotide with the structure m7G (5′) ppp (5′) N (cap 0 structure) or a derivative thereof, which can be incorporated during RNA synthesis or can be enzymatically engineered after RNA transcription (e.g., by using Vaccinia Virus Capping Enzyme (VCE) consisting of mRNA triphosphatase, guanylyl-transferase and guanine-7-methyltransferase, which catalyzes the construction of N7-monomethylated cap 0 structures). Cap 0 structure plays an important role in maintaining the stability and translational efficacy of the RNA molecule. The 5′ cap of the RNA molecule may be further modified by a 2′-O-Methyltransferase which results in the generation of a cap 1 structure (m7Gppp [m2′-0] N), which may further increase translation efficacy. The nucleic acids may comprise one or more nucleotide analogs or modified nucleotides. A “nucleotide analog” herein includes a nucleotide that contains one or more chemical modifications (e.g., substitutions) in or on the nitrogenous base of the nucleoside (e.g. cytosine (C), thymine (T) or uracil (U)), adenine (A) or guanine (G)). A nucleotide analog can contain further chemical modifications in or on the sugar moiety of the nucleoside (e.g., ribose, deoxyribose, modified ribose, modified deoxyribose, six-membered sugar analog, or open-chain sugar analog), or the phosphate. The preparation of nucleotides and modified nucleotides and nucleosides are well-known in the art and many modified nucleosides and modified nucleotides are commercially available. Modified nucleobases which can be incorporated into modified nucleosides and nucleotides and be present in an RNA molecule include: m5C (5-methylcytidine), m5U (5-methyluridine), m6A (N6-methyladenosine), s2U (2-thiouridine), Um (2-O-methyluridine), m1A (1-methyladenosine); m2A (2-methyladenosine); Am (2-1-O-methyladenosine); ms2m6A (2-methylthio-N6-methyladenosine); i6A (N6-isopentenyladenosine); ms2i6A (2-methylthio-N6isopentenyladenosine); io6A (N6-(cis-hydroxyisopentenyl)adenosine); ms2io6A (2-methylthio-N6-(cis-hydroxyisopentenyl) adenosine); g6A (N6-glycinylcarbamoyladenosine); t6A (N6-threonyl carbamoyladenosine); ms2t6A (2-methylthio-N6-threonyl carbamoyladenosine); m6t6A (N6-methyl-N6-threonylcarbamoyladenosine); hn6A (N6-hydroxynorvalylcarbamoyl adenosine); ms2hn6A (2-methylthio-N6-hydroxynorvalyl carbamoyladenosine); Ar(p) (2-0-ribosyladenosine (phosphate)); I (inosine); mil (1-methylinosine); m′1m (1,2′-0-dimethylinosine); m3C (3-methylcytidine); Cm (2T-0-methylcytidine); s2C (2-thiocytidine); ac4C (N4-acetylcytidine); £5C (5-fonnylcytidine); m5Cm (5,2-O-dimethylcytidine); ac4Cm (N4acetyl2TOmethylcytidine); k2C (lysidine); mlG (1-methylguanosine); m2G (N2-methylguanosine); m7G (7-methylguanosine); Gm (2′-0-methylguanosine); m22G (N2,N2-dimethylguanosine); m2Gm (N2,2′-0-dimethylguanosine); m22Gm (N2,N2,2′-0-trimethylguanosine); Gr(p) (2′-0-ribosylguanosine (phosphate)); yW (wybutosine); o2yW (peroxywybutosine); OHyW (hydroxywybutosine); OHyW* (undermodified hydroxywybutosine); imG (wyosine); mimG (methylguanosine); Q (queuosine); oQ (epoxyqueuosine); galQ (galtactosyl-queuosine); manQ (mannosyl-queuosine); preQo (7-cyano-7-deazaguanosine); preQi (7-aminomethyl-7-deazaguanosine); G* (archaeosine); D (dihydrouridine); m5Um (5,2′-0-dimethyluridine); s4U (4-thiouridine); m5s2U (5-methyl-2-thiouridine); s2Um (2-thio-2′-0-methyluridine); acp3U (3-(3-amino-3-carboxypropyl)uridine); ho5U (5-hydroxyuridine); mo5U (5-methoxyuridine); cmo5U (uridine 5-oxyacetic acid); mcmo5U (uridine 5-oxyacetic acid methyl ester); chm5U (5-(carboxyhydroxymethyl)uridine)); mchm5U (5-(carboxyhydroxymethyl)uridine methyl ester); mcm5U (5-methoxycarbonyl methyluridine); mcm5Um (S-methoxycarbonylmethyl-2-O-methyluridine); mcm5s2U (5-methoxycarbonylmethyl-2-thiouridine); nm5s2U (5-aminomethyl-2-thiouridine); mnm5U (5-methylaminomethyluridine); mnm5s2U (5-methylaminomethyl-2-thiouridine); mnm5se2U (5-methylaminomethyl-2-selenouridine); ncm5U (5-carbamoylmethyl uridine); ncm5Um (5-carbamoylmethyl-2′-O-methyluridine); cmnm5U (5-carboxymethylaminomethyluridine); cnmm5Um (5-carboxymethy 1 aminomethyl-2-L-Omethyl uridine); cmnm5s2U (5-carboxymethylaminomethyl-2-thiouridine); m62A (N6,N6-dimethyladenosine); Tm (2′-0-methylinosine); m4C (N4-methylcytidine); m4Cm (N4,2-0-dimethylcytidine); hm5C (5-hydroxymethylcytidine); m3U (3-methyluridine); cm5U (5-carboxymethyluridine); m6Am (N6,T-0-dimethyladenosine); rn62Am (N6,N6,0-2-trimethyladenosine); m2′7G (N2,7-dimethylguanosine); m2′2′7G (N2,N2,7-trimethylguanosine); m3Um (3,2T-0-dimethyluridine); m5D (5-methyldihydrouridine); £5Cm (5-formyl-2′-0-methylcytidine); mlGm (1,2′-0-dimethylguanosine); m′Am (1,2-O-dimethyl adenosine) irinomethyluridine); tm5s2U (S-taurinomethyl-2-thiouridine)); iniG-14 (4-demethyl guanosine); imG2 (isoguanosine); ac6A (N6-acetyladenosine), hypoxanthine, inosine, 8-oxo-adenine, 7-substituted derivatives thereof, dihydrouracil, pseudouracil, 2-thiouracil, 4-thiouracil, 5-aminouracil, 5-(Ci-Ce)-alkyluracil, 5-methyluracil, 5-(C2-C6)-alkenyluracil, 5-(C2-Ce)-alkynyluracil, 5-(hydroxymethyl)uracil, 5-chlorouracil, 5-fluorouracil, 5-bromouracil, 5-hydroxycytosine, 5-(Ci-C6)-alkylcytosine, 5-methylcytosine, 5-(C2-C6)-alkenylcytosine, 5-(C2-C6)-alkynylcytosine, 5-chlorocytosine, 5-fluorocytosine, 5-bromocytosine, N2-dimethylguanine, 7-deazaguanine, 8-azaguanine, 7-deaza-7-substituted guanine, 7-deaza-7-(C2-C6)alkylguanine, 7-deaza-8-substituted guanine, 8-hydroxyguanine, 6-thioguanine, 8-oxoguanine, 2-aminopurine, 2-amino-6-chloropurine, 2,4-diaminopurine, 2,6-diaminopurine, 8-azapurine, substituted 7-deazapurine, 7-deaza-7-substituted purine, 7-deaza-8-substituted purine, hydrogen (abasic residue), m5C, m5U, m6A, s2U, W, or 2′-0-methyl-U.

### Formulations

[0429] The pH of a composition for use herein is usually between 6 and 8, and more preferably between 6.5 and 7.5 (e.g. about 7). Stable pH may be maintained by the use of a buffer (e.g. an acetate, citrate, histidine, maleate, phosphate, succinate, tartrate, or Tris buffer, a citrate buffer, phosphate buffer, or a histidine buffer). Thus, a composition will generally include a buffer. A composition may be sterile and/or pyrogen-free. Compositions may be isotonic with respect to humans.

[0430] It is well known that for parenteral administration solutions should have a pharmaceutically acceptable osmolality to avoid cell distortion or lysis. A pharmaceutically acceptable osmolality will generally mean that solutions will have an osmolality which is approximately isotonic or mildly hypertonic. Suitably the compositions of the present invention when reconstituted will have an osmolality in the range of 250 to 750 mOsm/kg, for example, the osmolality may be in the range of 250 to 550 mOsm/kg, such as in the range of 280 to 500 mOsm/kg. In a particularly preferred embodiment, the osmolality may be in the range of 280 to 310 mOsm/kg.

[0431] Osmolality may be measured according to techniques known in the art, such as by the use of a commercially available osmometer, for example the Advanced™ Model 2020 available from Advanced Instruments Inc. (USA).

[0432] An “isotonicity agent” is a compound that is physiologically tolerated and imparts a suitable tonicity to a formulation to prevent the net flow of water across cell membranes that are in contact with the formulation. In some embodiments, the isotonicity agent used for the composition is a salt (or mixtures of salts), conveniently the salt is sodium chloride, suitably at a concentration of approximately 150 nM. In other embodiments, however, the composition comprises a non-ionic isotonicity agent and the concentration of sodium chloride in the composition is less than 100 mM, such as less than 80 mM, e.g. less than 50 mM, such as less 40 mM, less than 30 mM and especially less than 20 mM. The ionic strength in the composition may be less than 100 mM, such as less than 80 mM, e.g. less than 50 mM, such as less 40 mM or less than 30 mM.

[0433] In a particular embodiment, the non-ionic isotonicity agent is a polyol, such as sucrose and/or sorbitol. The concentration of sorbitol may e.g. between about 3% and about 15% (w/v), such as between about 4% and about 10% (w/v). Adjuvants comprising an immunologically active saponin fraction and a TLR4 agonist wherein the isotonicity agent is salt or a polyol have been described in WO2012/080369.

[0434] A human dose volume for use herein is between 0.25-1.5 ml (such as between 0.5 and 1.0 ml, e.g. a volume of about 0.5 ml; specifically a volume of 0.45-0.55 ml; or more specifically a volume of 0.5 ml). The volumes of the compositions used may depend on the delivery route and location, with smaller doses being given by the intradermal route. A unit dose container may contain an overage to allow for proper manipulation of materials during administration of the unit dose.

[0435] An adjuvant may be administered separately from an antigen or co-administered (i.e., combined, either during manufacturing or extemporaneously, with an antigen into an immunogenic composition for combined administration).

[0436] Immunogenic compositions for use herein may further comprise one or more pharmaceutically acceptable additives such as buffers, carriers, excipients, tonicity agents, wetting or emulsifying agents, detergents, antimicrobials, and diluents. Pharmaceutically acceptable additives are known in the field (e.g., in Remington's Pharmaceutical Sciences, by E. W. Martin, Mack Publishing Co., Easton, Pa., 15th Edition (1975)).

[0437] A pharmaceutically acceptable additive for use herein may be sodium salts (e.g. sodium chloride) to give tonicity. A concentration of 1.0±2 mg/ml NaCl is typical.

[0438] Suitable carriers are typically large, slowly metabolized macromolecules such as proteins (e.g., nanoparticles), polysaccharides, polylactic acids, polyglycolic acids, polymeric amino acids, amino acid copolymers, sucrose, trehalose, lactose, lipid aggregates (such as oil droplets or liposomes), and inactive virus particles. Sterile pyrogen-free, phosphate-buffered physiologic saline is a typical carrier. Such carriers are well known in the art. A pharmaceutically acceptable additive for use herein may comprise a sugar alcohol (e.g. mannitol) or a disaccharide (e.g., sucrose or trehalose), e.g., at around 15-30 mg/ml (e.g. 25 mg/ml).

[0439] The additive may comprise a pharmaceutically acceptable diluent (e.g., sterile water), saline, glycerol, etc. Additionally, a pharmaceutically acceptable additive may comprise auxiliary substances, such as wetting or emulsifying agents, or pH buffering substances.

[0440] The additive may comprise a pharmaceutically acceptable excipient. Such excipients include, without limitation: glycerol, polyethylene glycol (PEG), glass forming polyols (such as, sorbitol, trehalose) N-lauroylsarcosine (e.g., sodium salt), L-proline, non-detergent sulfobetaine, guanidine hydrochloride, urea, trimethylamine oxide, KCl, Ca2+, Mg2+, Mn2+, Zn2+(and other divalent cation related salts), dithiothreitol (DTT), dithioerythrol, ß-mercaptoethanol, Detergents (including, e.g., Tween80, Tween20, Triton X-100, NP-40, Empigen BB, Octylglucoside, Lauroyl maltoside, Zwittergent 3-08, Zwittergent 3-10, Zwittergent 3-12, Zwittergent 3-14, Zwittergent 3-16, CHAPS, sodium deoxycholate, sodium dodecyl sulphate, and cetyltrimethylammonium bromide.

[0441] A pharmaceutically acceptable additive for use herein may be an antimicrobial, particularly when packaged in multiple dose format. Antimicrobials such as thiomersal and 2 phenoxyethanol are commonly found in vaccines, but it is preferred to use either a mercury-free preservative or no preservative at all. In certain embodiments, the antigen(s) may be conjugated to a bacterial toxoid, such as a toxoid from diphtheria, tetanus, cholera, H. pylori, or another pathogen.

[0442] A pharmaceutically acceptable additive for use herein may be a detergent, e.g., a TWEEN (polysorbate), such as TWEEN80. Detergents are generally present at low levels e.g. <0.01%.

[0443] In general, the nature of the pharmaceutically acceptable additive will depend on the particular mode of administration being employed. For instance, parenteral formulations usually include injectable fluids that include pharmaceutically and physiologically acceptable fluids such as water, physiological saline, balanced salt solutions, aqueous dextrose, glycerol or the like as a vehicle. In certain formulations (for example, solid compositions, such as powder forms), a liquid diluent is not employed. In such formulations, non-toxic solid carriers can be used, including for example, pharmaceutical grades of trehalose, mannitol, lactose, starch or magnesium stearate.

[0444] In certain embodiments, the pharmaceutically acceptable additive comprises a carrier, wherein the carrier is a pharmaceutically acceptable Fc domain of a human IgG1 antibody. In certain embodiments, an antigen (e.g., a SARS-βCoV spike protein or fragment thereof) is operably linked (directly or indirectly) to a pharmaceutically acceptable IgG1 antibody or Fc thereof (i.e., a chimeric protein). Such an approach was investigated as a candidate SARS-CoV-1 vaccine whereby the Receptor Binding Domain (RBD) of the SARS-CoV-1 spike protein was fused with an IgG1 Fc (RBD-Fc) and shown to elicit an immune response (Zheng B J et al. 2008 Hong Kong Med J 14(Suppl 4):S39-43; Du L. et al. 2009 Nat. Rev. Microbio. 7:226-236).

[0445] In certain embodiments, the pharmaceutically acceptable additive comprises a carrier, wherein the carrier is a pharmaceutically acceptable nanoparticle. In certain embodiments, an antigen (e.g., a SARS-βCoV spike protein or fragment thereof) is operably linked (directly or indirectly) to a pharmaceutically acceptable nanoparticle (e.g., lumazine synthase nanoparticle, ferritin nanoparticle, or an aldolase-based nanoparticle). See, e.g., WO2015/156870 (PCT/US2015/011534, DENG Z.), describing nanoparticle-polypeptide conjugates linked through an isopeptide bond (see also Bruun et al. 2018 ACS Nano 12(9):8855-8866 describing operable linkage to aldolase nanoparticles through isopeptide bond (“SpyTag-SpyCatcher”)). Pharmaceutically acceptable nanoparticles as carriers, as well as methods of using them to present an antigen, are known and include lumazine synthase, ferritin, or aldolase-based nanoparticles (or nanocages) or nanoparticles derived therefrom (see WO 2005/121330; WO 2013/044203; WO 2016/037154; and Bruun et al. 2018 ACS Nano 12(9):8855-8866). Such nanoparticles may be “self-assembling” (see WO 2015/048149). In the context of nanoparticles (or nanocages) as carriers, operable linkage of antigens onto a nanoparticle can be achieved through a variety of techniques including spontaneous isopeptide bond formation, chemical conjugation, genetic fusion, or bio-orthogonal chemistry with unnatural amino acids (see Bruun et al. 2018 ACS Nano 12(9):8855-8866 at 8855 and references therein). Linkers may be Universal T cell epitopes or Glycine/Serine/Alanine linkers (8 to 14 amino acid residues containing repeats of Glycine, Serine, or Alanine such as that shown in SEQ ID NO: 121) or Universal T cell epitopes (such as PADRE (SEQ ID NO: 122), D (SEQ ID NO: 123), TpD (SEQ ID NO: 124). In the context of betacoronavirus vaccination, T cell epitopes from a betacoronavirus antigen may be used (such as a T cell epitope from SARS CoV-2 M, N, or Spike (S) proteins). Bacterial lumazine synthase (LS) has been investigated for use as a pharmaceutically acceptable carrier. LS acts in the biosynthesis of riboflavin and is present in organisms including bacteria, plants, and eubacteria. Jardine et al. reported LS from the bacterium Aquifex aeolicus fused to an HIV gp120 antigen self-assembled into a 60-mer nanoparticle. Jardine et al., Science 340:711-716 (2013). Expression of wild-type A. aeolicus LS has been reported in E. coli; Jardine et al. described use of mammalian cells to produce LS nanoparticles comprising the HIV gp120 antigen. H. pylori bacterial ferritin (see PDB Accession Number 3BVE) has been investigated for use as a pharmaceutically acceptable carrier. H. pylori bacterial ferritin consists of 24 identical polypeptide subunits that self-assemble into a spherical nanoparticle. Li et al. reported preparation of a nucleotide sequence encoding a fusion of bacterial (H. pylori) ferritin subunit polypeptide, a rotavirus VP6 antigen, and a histidine tag to aid in purification, with expression in a prokaryotic (E. coli) system and removal of the His-tag. The expressed fusion polypeptides are described as self-assembling into spherical NPs displaying the rotavirus capsid protein VP6, and capable of inducing an immune response in mice. (Li et al., J Nanobiotechnol 17:13 (2019)). Wang et al. designed chimeric polypeptides comprising H. pylori ferritin and antigenic peptides from N. gonorrhoeae; the chimeric polypeptide is described as assembling into a 24-mer nanoparticle displaying the antigenic peptides on the NP exterior surface. (Wang et al., FEBS Open Bio 7(8):1196 (2017)). Kanekiyo et al. described a self-assembling recombinant bacterial (H. pylori) ferritin nanoparticle (24-mer), comprising fusions of the ferritin subunit polypeptide and influenza HA antigenic peptides, which displayed influenza HA trimers on its surface (Kanekiyo et al., Nature 499(7456):102 (2013)). Helicobacter pylori Neutrophil Activating Protein (HP-NAP) is a self-assembling nanoparticle known for its adjuvanting properties (WO 2007/039451 (PCT/EP2006/066507, DEL PRETE et al.)) that may be used as a carrier in certain embodiments. Nanoparticles based on insect ferritin have been investigated for use as a pharmaceutically acceptable carrier, in particular comprising both heavy and light chain subunit polypeptides for use in displaying, on the NP surface, trimeric antigens (WO2018/005558 (PCT/US2017/039595), Kwong et al.). Also, Li et al. described a nanoparticle made of recombinant fusion polypeptides comprising a human ferritin light-chain subunit and a short HIV-1 antigenic peptide attached to the amino terminus of the ferritin light-chain sequence, with self-assembly of these fusion polypeptides resulting in placement of the HIV-1 antigenic peptide at the exterior surface of the NP. Li et al., Ind. Biotechnol. 2:143-47 (2006)). Nanoparticles (nanocages) based on the Thermotoga maritima 2-keto-3-deoxy-phosphogluconate (KDPG) aldolase (PDB Accession Number 1WA3) for use as carriers and antigen display are also known and may be used (e.g., what is referred to as “i301” or “I3-01” in the field (Hsia et al. 2016 Nature 535(7610):136-139; PDB Accession Number 5KP9)—modified i301 nanocages are also known, e.g. what is referred to as “mi3” in the field (Bruun et al. 2018 ACS Nano 12(9):8855-8866)).

### Production and Delivery

[0446] Compositions of the invention will generally be administered directly to a subject (e.g., a human subject). Direct delivery may be accomplished by parenteral injection (e.g. subcutaneously, intraperitoneally, transdermally, intravenously, intramuscularly, intranasal, or to the interstitial space of a tissue), or by any other suitable route. Intramuscular administration is preferred e.g. to the thigh or the upper arm. Injection may be via a needle (e.g. a hypodermic needle), but needle-free injection may alternatively be used. In certain embodiments, a presently provided immunogenic composition is administered to a subject intranasally or intramuscularly. Intranasal and intramuscular vaccination was previously examined, with success, for candidate SARS-CoV-1 vaccines (Zheng B J et al. 2008 Hong Kong Med J 14(Suppl 4): S39-43). In some embodiments, the presently provided modified spike proteins or fragments thereof are delivered to a subject by administration of an immunologically effective amount of one or more recombinant nucleic acid molecules that together encode the modified spike proteins or fragments thereof, thereby producing an immune response to the modified spike proteins or fragments thereof. In some embodiments, nucleic acids encoding the modified spike proteins or fragments thereof are prepared by in vitro transcription (IVT), as discussed elsewhere herein. Such nucleic acid molecules useful for delivery to a subject and/or useful for nucleic acid production are thus embodiments of the invention.

[0447] The nucleic acid molecule of the invention may, for example, be RNA or DNA, such as a plasmid DNA. In one aspect, the invention provides a nucleic acid sequence comprising a construct encoding the modified spike proteins or fragments thereof, and further comprising additional sequence elements. For instance, the nucleic acid may comprise sequence elements useful for the functioning of a mRNA, a self-replicating RNA, a plasmid, or the like.

[0448] In some embodiments, the recombinant nucleic acid molecule is a DNA molecule. In one embodiment, the invention relates to a recombinant DNA molecule that encodes a mRNA molecule as described herein. In one embodiment, the invention relates to a recombinant DNA molecule that encodes a self replicating RNA molecule as described herein. In some embodiments, the recombinant DNA molecule is a plasmid and may serve as a template for synthesis of RNA in vitro. In such embodiments, the plasmid may comprise a bacteriophage (T7 or SP6) promoter upstream of the mRNA- or self-replicating-RNA encoding region to facilitate the synthesis of RNA in vitro. The plasmid may further comprise a restriction site at the end of the poly-A tail-encoding region, or a hepatitis delta virus (HDV) ribozyme immediately downstream of the poly(A)-tail generates the correct 3′-end through its self-cleaving activity. In some embodiments, the recombinant DNA molecule includes a mammalian promoter that drives transcription of the encoded self replicating RNA molecule as described herein. A recombinant DNA molecule that encodes a self replicating RNA molecule as described herein that is useful in accordance with the invention, can be prepared by the techniques described in WO 2012/051211 A2.

[0449] In some embodiments, the recombinant DNA molecule is an adenoviral vector, such as a simian adenoviral vector, encoding the modified spike proteins or fragments thereof. In embodiments of the adenoviral vectors of the invention, the adenoviral DNA is capable of entering a mammalian target cell, i.e. it is infectious. An infectious recombinant adenovirus of the invention can be used as a prophylactic or therapeutic vaccine and for gene therapy. Thus, in an embodiment, the recombinant adenovirus comprises an endogenous molecule for delivery into a target cell, such as a human cell. Such adenoviral vectors are known, see, e.g., WO 2018/104919. The endogenous molecule for delivery into a target cell can be an expression cassette. In an embodiment of the invention, the vector is a functional or an immunogenic derivative of an adenoviral vector. By “derivative of an adenoviral vector” is meant a modified version of the vector, e.g., one or more nucleotides of the vector are deleted, inserted, modified or substituted.

[0450] In a preferred embodiment, the nucleic acid molecule is an RNA molecule. In such embodiments, the RNA molecule comprises a construct encoding the modified spike proteins or fragments thereof disclosed herein. In a further preferred embodiment, the RNA molecule comprises mRNA sequence elements such as a cap, 5′-UTR, 3′-UTR, and poly-A tail. In a more preferred embodiment, the RNA molecule is a self-amplifying RNA molecule (“SAM”).

[0451] Self-amplifying (or self-replicating) RNA molecules are well known in the art and can be produced by using replication elements derived from, e.g., alphaviruses, and substituting the structural viral proteins with a nucleotide sequence encoding a protein of interest. A self-amplifying RNA molecule is typically a +-strand molecule which can be directly translated after delivery to a cell, and this translation provides a RNA-dependent RNA polymerase which then produces both antisense and sense transcripts from the delivered RNA. Thus, the delivered RNA leads to the production of multiple daughter RNAs. These daughter RNAs, as well as collinear subgenomic transcripts, may be translated themselves to provide in situ expression of an encoded polypeptide, or may be transcribed to provide further transcripts with the same sense as the delivered RNA which are translated to provide in situ expression of the antigen. The overall result of this sequence of transcriptions is a huge amplification in the number of the introduced replicon RNAs and so the encoded antigen becomes a major polypeptide product of the cells. One suitable system for achieving self-replication in this manner is to use an alphavirus-based replicon. These replicons are +-stranded RNAs which lead to translation of a replicase (or replicase-transcriptase) after delivery to a cell. The replicase is translated as a polyprotein which auto-cleaves to provide a replication complex which creates genomic-strand copies of the +-strand delivered RNA. These −-strand transcripts can themselves be transcribed to give further copies of the +-stranded parent RNA and also to give a subgenomic transcript which encodes the antigen. Translation of the subgenomic transcript thus leads to in situ expression of the antigen by the infected cell. Suitable alphavirus replicons can use a replicase from a Sindbis virus, a Semliki forest virus, an eastern equine encephalitis virus, a Venezuelan equine encephalitis virus, etc. Mutant or wild-type virus sequences can be used e.g. the attenuated TC83 mutant of VEEV has been used in replicons, see WO2005/113782.

[0452] In one embodiment, the self-amplifying RNA molecule described herein encodes (i) an RNA-dependent RNA polymerase which can transcribe RNA from the self-amplifying RNA molecule and (ii) a presently provided modified spike protein or fragments thereof. The polymerase can be an alphavirus replicase e.g. comprising one or more of alphavirus proteins nsP1, nsP2, nsP3 and nsP4.

[0453] In certain embodiments, the self-amplifying RNA molecule is an alphavirus-derived RNA replicon as discussed herein.

[0454] Whereas natural alphavirus genomes encode structural virion proteins in addition to the non-structural replicase polyprotein, in certain embodiments, the self-amplifying RNA molecules do not encode alphavirus structural proteins. Thus, the self-amplifying RNA can lead to the production of genomic RNA copies of itself in a cell, but not to the production of RNA-containing virions. The inability to produce these virions means that, unlike a wild-type alphavirus, the self-amplifying RNA molecule cannot perpetuate itself in infectious form. The alphavirus structural proteins which are necessary for perpetuation in wild-type viruses are absent from self-amplifying RNAs of the present disclosure and their place is taken by gene(s) encoding the immunogen of interest, such that the subgenomic transcript encodes the immunogen rather than the structural alphavirus virion proteins. Thus, a self-amplifying RNA molecule useful with the invention may have two open reading frames. The first (5′) open reading frame encodes a replicase; the second (3′) open reading frame encodes an antigen. In some embodiments the RNA may have additional (e.g. downstream) open reading frames e.g. to encode further antigens or to encode accessory polypeptides.

[0455] Suitably, the self-amplifying RNA molecule disclosed herein has a 5′ cap (e.g. a 7-methylguanosine) which can enhance in vivo translation of the RNA. A self-amplifying RNA molecule may have a 3′ poly-A tail. It may also include a poly-A polymerase recognition sequence (e.g. AAUAAA) near its 3′ end. Self-amplifying RNA molecules can have various lengths but they are typically 5000-25000 nucleotides long. Self-amplifying RNA molecules will typically be single-stranded. Single-stranded RNAs can generally initiate an adjuvant effect by binding to TLR7, TLR8, RNA helicases and/or PKR. RNA delivered in double-stranded form (dsRNA) can bind to TLR3, and this receptor can also be triggered by dsRNA which is formed either during replication of a single-stranded RNA or within the secondary structure of a single-stranded RNA.

[0456] The self-amplifying RNA can conveniently be prepared by in vitro transcription (IVT). IVT can use a (cDNA) template created and propagated in plasmid form in bacteria or created synthetically (for example by gene synthesis and/or polymerase chain-reaction (PCR) engineering methods). For instance, a DNA-dependent RNA polymerase (such as the bacteriophage T7, T3 or SP6 RNA polymerases) can be used to transcribe the self-amplifying RNA from a DNA template. Appropriate capping and poly-A addition reactions can be used as required (although the replicon's poly-A is usually encoded within the DNA template). These RNA polymerases can have stringent requirements for the transcribed 5′ nucleotide(s) and in some embodiments these requirements must be matched with the requirements of the encoded replicase, to ensure that the IVT-transcribed RNA can function efficiently as a substrate for its self-encoded replicase.

[0457] A self-amplifying RNA can include (in addition to any 5′ cap structure) one or more nucleotides having a modified nucleobase. An RNA used with the invention ideally includes only phosphodiester linkages between nucleosides, but in some embodiments, it can contain phosphoramidate, phosphorothioate, and/or methylphosphonate linkages.

[0458] The self-replicating RNA molecule may encode a single heterologous polypeptide antigen (i.e., be “monocistronic” encoding, e.g., a betacoronavirus S protein or fragment thereof) or, optionally, two or more heterologous polypeptide antigens (i.e., be “polycistronic”). Further details concerning use of polycistronic vectors to provide nucleic acid sequences that encode two or more proteins in desired relative amounts are provided in WO 2012/051211 A2, which is incorporated by reference for its teachings relating to expression of proteins for antigen delivery for vaccines. These teachings can be applied to expression of two or more betacoronavirus spike proteins in accordance with the present invention. Two or more heterologous polypeptides generated from a self-replicating RNA molecule may be expressed as a fusion polypeptide (fusion protein) or as separate polypeptides. The self-replicating RNA molecules described herein may be engineered to express multiple nucleotide sequences, from two or more open reading frames, thereby allowing co-expression of proteins, such as one or more betacoronavirus proteins (e.g., including one or more S protein or S protein fragment open reading frames), together with cytokines or other immunomodulators, which can enhance the generation of an immune response. Such a self-replicating RNA molecule might be particularly useful, for example, in the production of various gene products (e.g., proteins) at the same time, for example, as a bivalent or multivalent vaccine.

[0459] In some embodiments a self-replicating RNA molecule is provided comprising, from 5′ to 3′, polynucleotide sequences selected from the following: (A) a polynucleotide sequence having SEQ ID NO: 119; a polynucleotide sequence which is at least 70%, at least 75%, at least 80%, at least 85%, at least 90%, at least 91%, at least 92%, at least 93%, at least 94%, at least 95%, at least 96%, at least 97%, at least 98%, or at least 99% identical to SEQ ID NO: 119; or a polynucleotide sequence that is a fragment of SEQ ID NO: 119; (B) a polynucleotide sequence encoding a betacoronavirus S protein or S protein fragment as described elsewhere herein; and (C) a polynucleotide sequence having SEQ ID NO: 120; a polynucleotide sequence which is at least 70%, at least 75%, at least 80%, at least 85%, at least 90%, at least 91%, at least 92%, at least 93%, at least 94%, at least 95%, at least 96%, at least 97%, at least 98%, or at least 99% identical to SEQ ID NO: 120; or a polynucleotide sequence that is a fragment of SEQ ID NO: 120; wherein a fragment of SEQ ID NO: 119 or SEQ ID NO: 120 comprises a contiguous stretch of the nucleic acid sequence of the full-length sequence up to 1, 2, 3, 4, 5, 6, 7, 8, 9, 10, 15, 20, 25, 26, 27, 28, 29, or 30 nucleic acids shorter than full-length sequence.

[0460] In some embodiments is provided a self-replicating RNA molecule comprising, from 5′ to 3′, polynucleotide sequences selected from the following:

[0461] a polynucleotide sequence having SEQ ID NO: 119; a polynucleotide sequence which is at least 70%, at least 75%, at least 80%, at least 85%, at least 90%, at least 91%, at least 92%, at least 93%, at least 94%, at least 95%, at least 96%, at least 97%, at least 98%, or at least 99% identical to SEQ ID NO: 119; or a polynucleotide sequence that is a fragment of SEQ ID NO: 119;

[0462] a polynucleotide sequence encoding a polypeptide having a sequence selected from the group consisting of SEQ ID NOS: 5-114; a polynucleotide sequence encoding a polypeptide having a sequence at least 70%, at least 75%, at least 80%, at least 85%, at least 90%, at least 91%, at least 92%, at least 93%, at least 94%, at least 95%, at least 96%, at least 97%, at least 98%, or at least 99% identical to a polypeptide sequence selected from the group consisting of SEQ ID NOS: 5-114; or a polynucleotide sequence encoding a fragment of a polypeptide having a sequence selected from the group consisting of SEQ ID NOS: 5-114; and

[0463] a polynucleotide sequence having SEQ ID NO: 120; a polynucleotide sequence which is at least 70%, at least 75%, at least 80%, at least 85%, at least 90%, at least 91%, at least 92%, at least 93%, at least 94%, at least 95%, at least 96%, at least 97%, at least 98%, or at least 99% identical to SEQ ID NO: 120; or a polynucleotide sequence that is a fragment of SEQ ID NO: 120;

[0464] wherein a fragment of SEQ ID NO: 119 or SEQ ID NO: 120 comprises a contiguous stretch of the nucleic acid sequence of the full-length sequence up to 1, 2, 3, 4, 5, 6, 7, 8, 9, 10, 15, 20, 25, 26, 27, 28, 29, or 30 nucleic acids shorter than full-length sequence.

[0465] In some embodiments is provided a self-replicating RNA molecule comprising, from 5′ to 3′, a polynucleotide sequence having SEQ ID NO: 119, a polynucleotide sequence encoding a polynucleotide sequence encoding a betacoronavirus S protein or S protein fragment as described elsewhere herein, and a polynucleotide sequence having SEQ ID NO: 120. In some embodiments is provided a self-replicating RNA molecule comprising, from 5′ to 3′, a polynucleotide sequence having SEQ ID NO: 119, a polynucleotide sequence encoding a polypeptide having a sequence selected from the group consisting of SEQ ID NOs: 5-114, and a polynucleotide sequence having SEQ ID NO: 120. In some embodiments, the self-replicating RNA molecules comprise from 5′ to 3′ a sequence which is at least 70%, at least 75%, at least 80%, at least 85%, at least 90%, at least 91%, at least 92%, at least 93%, at least 94%, at least 95%, at least 96%, at least 97%, at least 98%, or at least 99% identical to SEQ ID NO: 119, a polynucleotide sequence encoding a polypeptide having a sequence which is at least 70%, at least 75%, at least 80%, at least 85%, at least 90%, at least 91%, at least 92%, at least 93%, at least 94%, at least 95%, at least 96%, at least 97%, at least 98%, or at least 99% identical to a sequence selected from the group consisting of SEQ ID NOS: 5-114, and a sequence which is at least 70%, at least 75%, at least 80%, at least 85%, at least 90%, at least 91%, at least 92%, at least 93%, at least 94%, at least 95%, at least 96%, at least 97%, at least 98%, or at least 99% identical to SEQ ID NO: 120. In some embodiments, the self-replicating RNA molecule comprises from 5′ to 3′ a sequence that is a fragment of SEQ ID NO: 119, a fragment of a full-length polynucleotide sequence encoding a polypeptide sequence selected from the group consisting of SEQ ID NOS: 5-114, and a sequence that is a fragment of SEQ ID NO: 120, wherein a fragment comprises a contiguous stretch of the nucleic acid sequence of the full-length sequence up to 1, 2, 3, 4, 5, 6, 7, 8, 9, 10, 15, 20, 25, 26, 27, 28, 29, or 30 nucleic acids shorter than full-length sequence.

[0466] The nucleic acid molecule of the invention may be associated with a viral or a non-viral delivery system. The delivery system (also referred to herein as a delivery vehicle) may have an adjuvant effects which enhance the immunogenicity of the encoded betacoronavirus Spike (S) protein or fragment thereof. For example, the nucleic acid molecule may be encapsulated in liposomes, non-toxic biodegradable polymeric microparticles or viral replicon particles (VRPs), or complexed with particles of a cationic oil-in-water emulsion. In some embodiments, the nucleic acid molecule is associated with a non-viral delivery material such as to form a cationic nano-emulsion (CNE) delivery system or a lipid nanoparticle (LNP) delivery system. In some embodiments, the nucleic acid molecule is associated with a non-viral delivery system, i.e., the nucleic acid molecule is substantially free of viral capsid. Alternatively, the nucleic acid molecule may be associated with viral replicon particles. In other embodiments, the nucleic acid molecule may comprise a naked nucleic acid, such as naked RNA (e.g. mRNA).

[0467] In a preferred embodiment, the RNA molecule or self-amplifying RNA molecule is associated with a non-viral delivery material, such as to form a cationic nanoemulsion (CNE) or a lipid nanoparticle (LNP).

[0468] CNE delivery systems and methods for their preparation are described in WO2012/006380. In a CNE delivery system, the nucleic acid molecule (e.g. RNA) which encodes the antigen is complexed with a particle of a cationic oil-in-water emulsion. Cationic oil-in-water emulsions can be used to deliver negatively charged molecules, such as an RNA molecule to cells. The emulsion particles comprise an oil core and a cationic lipid. The cationic lipid can interact with the negatively charged molecule thereby anchoring the molecule to the emulsion particles. Further details of useful CNEs can be found in WO2012/006380; WO2013/006834; and WO2013/006837 (the contents of each of which are incorporated herein in their entirety).

[0469] Thus, in one embodiment, an RNA molecule, such as a self-amplifying RNA molecule, encoding the modified spike proteins or fragments thereof may be complexed with a particle of a cationic oil-in-water emulsion. The particles typically comprise an oil core (e.g. a plant oil or squalene) that is in liquid phase at 25° C., a cationic lipid (e.g. phospholipid) and, optionally, a surfactant (e.g. sorbitan trioleate, polysorbate 80); polyethylene glycol can also be included. In some embodiments, the CNE comprises squalene and a cationic lipid, such as 1,2-dioleoyloxy-3-(trimethylammonio)propane (DOTAP). In some preferred embodiments, the delivery system is a non-viral delivery system, such as CNE, and the nucleic acid molecule comprises a self-amplifying RNA (mRNA). This may be particularly effective in eliciting humoral and cellular immune responses.

[0470] LNP delivery systems and non-toxic biodegradable polymeric microparticles, and methods for their preparation are described in WO2012/006376 (LNP and microparticle delivery systems); Geall et al. (2012) PNAS USA. September 4; 109(36): 14604-9 (LNP delivery system); and WO2012/006359 (microparticle delivery systems). LNPs are non-virion liposome particles in which a nucleic acid molecule (e.g. RNA) can be encapsulated. The particles can include some external RNA (e.g. on the surface of the particles), but at least half of the RNA (and ideally all of it) is encapsulated. Liposomal particles can, for example, be formed of a mixture of zwitterionic, cationic and anionic lipids which can be saturated or unsaturated, for example; DSPC (zwitterionic, saturated), DlinDMA (cationic, unsaturated), and/or DMG (anionic, saturated). Preferred LNPs for use with the invention include an amphiphilic lipid which can form liposomes, optionally in combination with at least one cationic lipid (such as DOTAP, DSDMA, DODMA, DLinDMA, DLenDMA, etc.). A mixture of DSPC, DlinDMA, PEG-DMG and cholesterol is particularly effective. Other useful LNPs are described in WO2012/006376; WO2012/030901; WO2012/031046; WO2012/031043; WO2012/006378; WO2011/076807; WO2013/033563; WO2013/006825; WO2014/136086; WO2015/095340; WO2015/095346; WO2016/037053. In some embodiments, the LNPs are RV01 liposomes, see the following references: WO2012/006376 and Geall et al. (2012) PNAS USA. September 4; 109(36): 14604-9. An LNP delivery approach is utilized for a candidate SARS-CoV-2 vaccine comprising LNP-encapsulated mRNA encoding spike (S) protein (see Le et al. 2020 Nat Rev Drug Disc 19:305-306).

[0471] In a further aspect, the invention provides a vector comprising a nucleic acid according to the invention.

[0472] A vector for use according to the invention may be any suitable nucleic acid molecule including naked DNA or RNA, a plasmid, a virus, a cosmid, phage vector such as lambda vector, an artificial chromosome such as a BAC (bacterial artificial chromosome), or an episome. For example, electroporation delivery of a DNA plasmid encoding spike (S) protein is being investigated as a candidate SARS-CoV-2 vaccine (see Le et al. 2020 Nat Rev Drug Disc 19:305-306). Alternatively, a vector may be a transcription and/or expression unit for cell-free in vitro transcription or expression, such as a T7-compatible system. The vectors may be used alone or in combination with other vectors such as adenovirus sequences or fragments, or in combination with elements from non-adenovirus sequences. Suitably, the vector has been substantially altered (e.g., having a gene or functional region deleted and/or inactivated) relative to a wild type sequence, and replicates and expresses the inserted polynucleotide sequence, when introduced into a host cell. For example, an Adenovirus type 5 (Ad5) vector that expresses spike (S) protein is being investigated as a candidate SARS-CoV-2 vaccine (see Le et al. 2020 Nat Rev Drug Disc 19:305-306). An adeno-associated virus (AAV) approach was also investigated as a candidate SARS-CoV-1 vaccine (intramuscular or mucosal delivery of an AAV-based vaccine containing the spike protein Receptor Binding Domain fragment, see Zheng B J et al. 2008 Hong Kong Med J 14(Suppl 4):S39-43 and Du L. et al. 2009 Nat. Rev. Microbio. 7:226-236).

[0473] In a further aspect, the invention provides a cell comprising a modified spike protein or fragment thereof, a nucleic acid encoding a presently provided modified spike protein or fragment thereof, or a vector according to the invention.

[0474] In one embodiment, the heterodimer according to the invention is expressed from a multicistronic vector. Suitably, the heterodimer is expressed from a single vector in which the nucleic sequences encoding the modified spike protein or fragment thereof are separated by an internal ribosomal entry site (IRES) sequence (Mokrejš, Martin, et al. “IRESite: the database of experimentally verified IRES structures (World Wide Web. iresite.org).” Nucleic acids research 34.suppl_1 (2006): D125-D130). Alternatively, the two nucleic sequences can be separated by a viral 2A or ‘2A-like’ sequence, which results in production of two separate polypeptides. 2A sequences are known from various viruses, including foot-and-mouth disease virus, equine rhinitis A virus, Thosea asigna virus, and porcine theschovirus-1. See e.g., Szymczak et al., Nature Biotechnology 22:589-594 (2004), Donnelly et al., J Gen Virol.; 82(Pt 5): 1013-25 (2001).

[0475] When a host cell herein is cultured under suitable conditions, the nucleic acid can express the modified spike protein or fragment thereof the modified spike protein or fragment thereof may then be purified from the host cell. Suitable host cells include, for example, insect cells (e.g., Aedes aegypti, Autographa californica, Bombyx mori, Drosophila melanogaster, Spodoptera frugiperda, and Trichoplusia ni), mammalian cells (e.g., human, non-human primate, horse, cow, sheep, dog, cat, and rodent (e.g., hamster)), avian cells (e.g., chicken, duck, and geese), bacteria (e.g., E. coli, Bacillus subtilis, and Streptococcus spp.), yeast cells (e.g., Saccharomyces cerevisiae, Candida albicans, Candida maltosa, Hansenual polymorpha, Kluyveromyces fragilis, Kluyveromyces lactis, Pichia guillerimondii, Pichia pastoris, Schizosaccharomyces pombe and Yarrowia lipolytica), Tetrahymena cells (e.g., Tetrahymena thermophila) or combinations thereof. Suitably, the host cell should be one that has enzymes that mediate glycosylation.

[0476] Suitable mammalian cells include, for example, Chinese hamster ovary (CHO) cells, human embryonic kidney cells (HEK-293 cells, typically transformed by sheared adenovirus type 5 DNA), NIH-3T3 cells, 293-T cells, Vero cells, HeLa cells, PERC.6 cells (ECACC deposit number 96022940), Hep G2 cells, MRC-5 (ATCC CCL-171), WI-38 (ATCC CCL-75), fetal rhesus lung cells (ATCC CL-160), Madin-Darby bovine kidney (“MDBK”) cells, Madin-Darby canine kidney (“MDCK”) cells (e.g., MDCK (NBL2), ATCC CCL34; or MDCK 33016, DSM ACC 2219), baby hamster kidney (BHK) cells, such as BHK21-F, HKCC cells, and the like.

[0477] In certain embodiments, the modified spike protein or fragment polynucleotide sequence is codon optimized for expression in a selected prokaryotic or eukaryotic host cell.

[0478] The modified spike protein or fragment can be recovered and purified from recombinant cell cultures by any of a number of methods well known in the art, including ammonium sulfate or ethanol precipitation, acid extraction, anion or cation exchange chromatography, phosphocellulose chromatography, hydrophobic interaction chromatography, affinity chromatography (e.g., using any of the tagging systems noted herein), hydroxyapatite chromatography, and lectin chromatography. Protein refolding steps can be used, as desired, in completing configuration of the mature protein. Finally, high performance liquid chromatography (HPLC) can be employed in the final purification steps. In addition to the references noted above, a variety of purification methods are well known in the art, including, e.g., those set forth in Sandana (1997) Bioseparation of Proteins, Academic Press, Inc.; and Bollag et al. (1996) Protein Methods, 2nd Edition Wiley-Liss, NY; Walker (1996) The Protein Protocols Handbook Humana Press, N.J., Harris and Angal (1990) Protein Purification Applications: A Practical Approach IRL Press at Oxford, Oxford, U.K.; Scopes (1993) Protein Purification: Principles and Practice 3rd Edition Springer Verlag, NY; Janson and Ryden (1998) Protein Purification: Principles, High Resolution Methods and Applications, Second Edition Wiley-VCH, NY; and Walker (1998) Protein Protocols on CD-ROM Humana Press, NJ.

[0479] The term “purification” or “purifying” here refers to the process of removing components from a composition or host cell or culture, the presence of which is not desired. Purification is a relative term, and does not require that all traces of the undesirable component be removed from the composition. In the context of vaccine production, purification includes such processes as centrifugation, dialyzation, ion-exchange chromatography, and size-exclusion chromatography, affinity-purification or precipitation. Immunogenic molecules or antigens or antibodies which have not been subjected to any purification steps (i.e., the molecule as it is found in nature) are not suitable for pharmaceutical (e.g., vaccine) use.

### Use of Immunogenic Compositions

[0480] The immunogenic compositions herein may be administered on a single dose or multidose schedule. Certain embodiments provide delivery (e.g., administration) to a non-human mammal (e.g., mice) on a three dose schedule with dose delivery every about three weeks (such as on days 1, 22, and 43) or about three weeks post-last-dose. Certain embodiments provide delivery to a human subject on a three dose schedule with dose delivery once every about 1-6 months (e.g., dose delivery between about one and six months post-last-dose) such as

[0481] second delivery about one month post-first-dose and third delivery about six months post-first-dose or, said another way, third delivery about five months post-second-dose (i.e., 0-1-6 schedule);

[0482] second delivery about two months post-first-dose and third delivery about six months post-first-dose or, said another way, third delivery about four months post-second-dose (i.e., 0-2-6 schedule) or

[0483] second delivery about one month post-first-dose and third delivery about three months post-first dose or, said another way, third delivery about two months post-first-dose (i.e., 0-1-3 schedule).

[0484] Certain embodiments provide delivery of an immunogenic composition to a human subject intramuscularly as a 3-dose vaccination course on a 0, 1, and 6 months schedule. A particular embodiment provides delivery of the immunogenic composition to a human subject intramuscularly as a 3-dose vaccination course on a 0, 1, and 6 months schedule. A particular embodiment provides delivery of the immunogenic composition to a human subject intramuscularly as a 3-dose vaccination course on a 0, 2, and 6 months schedule. A particular embodiment provides delivery of the immunogenic composition to a human subject intramuscularly as a 3-dose vaccination course on a 0, 1, and 3 months schedule. Another embodiment provides delivery to a human subject on a two dose schedule with a second dose delivery about one month, about two months, or about six months post-first-dose (i.e., delivery of an immunogenic composition to a human subject as a 2-dose vaccination course on a 0, 1; 0, 2; or 0, 6 months schedule). In a particular example, the immunogenic composition is administered to a human subject intramuscularly as a 2-dose vaccination course on a 0 and 1 months schedule. In a particular example, the immunogenic composition is administered to a human subject intramuscularly as a 2-dose vaccination course on a 0 and 6 months schedule.

[0485] A prime-boost regimen may be used. Prime-boost refers to eliciting two separate immune responses in the same individual: (i) an initial priming of the immune system followed by (ii) a secondary or boosting of the immune system weeks or months after the primary immune response has been established. Preferably, a boosting composition is administered about two to about 12 weeks after administering the priming composition to the subject, for example about 2, 3, 4, 5 or 6 weeks after administering the priming composition. In one embodiment, a boosting composition is administered one or two months after the priming composition. In one embodiment, a first boosting composition is administered one or two months after the priming composition and a second boosting composition is administered one or two months after the first boosting composition. A prime-boost regimen was previously examined, with success, for a candidate SARS-CoV-1 vaccine (Zheng B J et al. 2008 Hong Kong Med J 14(Suppl 4): S39-43); in particular priming with administration of an adeno-associated virus (AAV) containing SARS-CoV-1 spike protein RBD and boosting with RBD-specific peptides (Du L. et al. 2009 Nat. Rev. Microbio. 7:226-236).

### EXAMPLES

### Example 1: Stabilizing Mutants

### Symmetric Interface Design Using Rosetta HBNet Workflow, Targeting Cross-Protomer Residues:

[0486] HBNet is a computational design method/algorithm that runs within the Rosetta Commons (rosettacommons.org) scripts framework. HBNet detects and designs Hydrogen Bond Networks (hence, “HBNet”) within the user-defined design space and that meet user-defined criteria.

[0487] This study was to design stabilizing mutations of the Spike (S) protein from the SARS CoV-2 antigen using (1) hydrogen bonding networks and (2) cavity-filling substitutions to enhance the structural and conformational integrity of the pre-fusion trimer.

[0488] Rosetta comparative modeling (RosettaCM) (Song et al. 2013 Structure 21: 1735-1742) with symmetry restraints (DiMaio et al. 2011 PLoS ONE 6(6): e20450, doi:10.1371/journal.pone.0020450) was used to build a model of the SARS CoV-2 S antigen with the receptor binding domain (RBD) in the open conformation (PDB Accession Numbers: 6VSB, 6VYB), using combinations of x-ray and cryo-EM structures (PDB Accession Numbers: 6VYB, 6VW1, 6NB7 (SARS-CoV-1). As of Jun. 5, 2020, there were two “wild type” SARS-CoV-2 Spike Proteins described in the art. One was PDB 6VYB (from Vessler) and the other was PDB 6VSB (by Mcllelum). Unless otherwise noted, in the present application, the Vessler structure was used. Symmetric interface design was performed on the lowest energy RosettaCM structure, using the Monte-Carlo based HBNet algorithm to introduce polar networks between S protein protomers. Sequence design was done on the full S protein targeting the S1 & S2 domains or the S2 domain only (FIG. 2).

[0489] Fixed backbone design was performed after the generation of hydrogen bond networks, using RosettaHoles (Sheffler and Baker 2009 Protein Science 18:229-239) to detect cavities, and doing sequence design to find the most stabilizing mutant combinations.

[0490] The top sequences were selected based on overall Rosetta Energy, relative to the initial structure, indicating a correlation between the number of mutations (S1+S2-specific (i.e., S-specific) or S2-specific) and the difference in in silico stability (FIG. 2).

[0491] As these results demonstrate, a mutation(s) in one S protein monomer (protomer) sequence causes each protomer of the resultant S protein homotrimer to also incorporate that mutation(s). In this way, modification of an “S protein” or “S protein fragment” sequence would be understood without further specification of a particular protomer sequence being modified (such specification would instead be irrelevant, even confusing, to an artisan).

### Results:

[0492] In Table 1 are provided (from left column to right): certain target residues of wild type SARS-CoV-2 amino acid sequence SEQ ID NO: 3; certain target residues of control SARS-CoV-2 amino acid sequence SEQ ID NO: 4 (which, as compared to SEQ ID NO: 3, is modified to comprise the furin cleavage abrogation mutations and prefusion double proline mutations of Wrapp et al. (2020 Science 367(6483):1260-1263) as well as the D588G consensus mutation of Brufsky (20 Apr. 2020 J Med Virol, 7 pages, doi:10.1002/jmv.25902, therein D614G; see also Korber et al. 2020 bioRxiv (HyperTextTransferProtocolSecure: /doi.org/10.1101/2020.04.29.069054)); the presently provided point mutations of those target residues which were designed with HBNet (“HBNet mutations”) to increase the (thermo)stability of the wild type (SEQ ID NO: 3) or control (SEQ ID NO: 4) S proteins; and then a summary of what amino acids are present at those target residue positions within the designed, modified S protein fragment sequences SEQ ID NOs: 5-14. The sequence SEQ ID NO: 4 was used as the “parent” sequence for modified S proteins comprising HBNet mutations, so all of sequences SEQ ID NO: 5-14 comprise the furin cleavage abrogation mutations and prefusion double proline mutations that SEQ ID NO: 4 comprises. Further, SEQ ID NOs: 10-14 also comprise the D588G consensus mutation that is within SEQ ID NO: 4.

TABLE 1

| | Column | Column | Column | Column | Column | Column | Column | Column | Column | Column | Column | Column | Column |
|---|---|---|---|---|---|---|---|---|---|---|---|---|---|
| | #1 | #2 | #3 | #4 | #5 | #6 | #7 | #8 | #9 | #10 | #11 | #12 | #13 |
| | SEQ ID | SEQ ID | HBNet | SEQ ID | SEQ ID | SEQ ID | SEQ ID | SEQ ID | SEQ ID | SEQ ID | SEQ ID | SEQ ID | SEQ ID |
| Row # | NO: 3 | NO: 4 | mutations | NO: 5 | NO: 6 | NO: 7 | NO: 8 | NO: 9 | NO: 10 | NO: 11 | NO: 12 | NO: 13 | NO: 14 |
| 3 | F17 | | S | S | S | S | S | S | F | F | F | F | F |
| 4 | R18 | | M | M | M | M | M | M | R | R | R | R | R |
| 5 | E198 | | V | E | V | E | E | E | E | E | E | E | E |
| 6 | P199 | | L | L | L | L | L | L | P | P | P | P | P |
| 7 | T258 | | V | V | V | V | V | V | T | T | T | T | T |
| 8 | Q288 | | I or | I | I | D | D | I | Q | Q | Q | Q | Q |
| | | | D | | | | | | | | | | |
| 9 | N291 | | L or | L | L | T | T | L | N | N | N | N | N |
| | | | T | | | | | | | | | | |
| 10 | R293 | | E or | E | K | E | K | K | R | R | R | R | R |
| | | | K | | | | | | | | | | |
| 11 | L492 | | N | N | N | N | N | N | L | L | L | L | L |
| 12 | K531 | | L | L | L | L | L | L | K | K | K | K | K |
| 13 | L534 | | V | V | L | V | V | V | L | L | L | L | L |
| 14 | P535 | | S or | S | E | S | S | S | P | P | P | P | P |
| | | | E | | | | | | | | | | |
| 15 | F536 | | T | T | F | T | T | T | F | F | F | F | F |
| 16 | Q538 | | L | L | L | L | L | L | Q | Q | Q | Q | Q |
| 17 | G540 | | R or | R | H | R | R | M | G | G | G | G | G |
| | | | H or | | | | | | | | | | |
| | | | M | | | | | | | | | | |
| 18 | R541 | | V | V | V | V | V | V | R | R | R | R | R |
| 19 | D542 | | H | H | H | H | H | H | D | D | D | D | D |
| 20 | I543 | | S | S | S | S | S | S | I | I | I | I | I |
| 21 | D545 | | N | N | N | N | N | N | D | D | D | D | D |
| 22 | D548 | | L | L | L | L | L | L | D | D | D | D | D |
| 23 | A549 | | G | A | A | A | A | G | A | A | A | A | A |
| 24 | T562 | | V | V | V | V | V | V | T | T | T | T | T |
| 25 | P563 | | S | S | S | S | S | S | P | P | P | P | P |
| 26 | F566 | | S | S | S | S | S | S | F | F | F | F | F |
| 27 | G568 | | A or | A | A | R | R | A | G | G | G | G | G |
| | | | R | | | | | | | | | | |
| 28 | Q587 | | Y or | Y | Y | R | R | Y | Q | Q | Q | Q | Q |
| | | | R | | | | | | | | | | |
| 29 | D588 | G | N | N | N | N | N | N | G | G | G | G | G |
| 30 | N590 | | W | W | W | W | W | W | N | N | N | N | N |
| 31 | R620 | | K | K | R | K | R | R | R | R | R | R | R |
| 32 | P639 | | A or | A | A | Y | A | Y | P | P | P | P | P |
| | | | Y | | | | | | | | | | |
| 33 | A642 | | G | G | A | G | A | A | A | A | A | A | A |
| 34 | R656 | G | | G | G | G | G | G | G | G | G | G | G |
| 35 | R657 | S | | S | S | S | S | S | S | S | S | S | S |
| 36 | R659 | S | | S | S | S | S | S | S | S | S | S | S |
| 37 | T670 | | W or | W | Q | W | Q | Q | Q | Q | Q | Q | Q |
| | | | Q | | | | | | | | | | |
| 38 | M671 | | I | I | I | I | I | I | I | I | I | I | I |
| 39 | L673 | | T | T | T | T | T | T | T | T | T | T | T |
| 40 | A675 | | S | S | S | S | S | S | S | S | S | S | S |
| 41 | E676 | | W | W | W | W | W | W | W | W | W | W | W |
| 42 | A680 | | D or | D | D | E | D | D | E | D | D | D | D |
| | | | E | | | | | | | | | | |
| 43 | Y681 | | N | N | N | N | N | N | N | N | N | N | N |
| 44 | N684 | | D | D | D | D | D | D | D | D | D | D | D |
| 45 | S685 | | A | A | A | A | A | A | A | A | A | A | A |
| 46 | I688 | | V | I | I | I | V | I | I | V | I | I | I |
| 47 | P689 | | A | A | A | A | A | A | A | A | A | A | A |
| 48 | S709 | | W or | W | W | H | H | W | W | W | W | W | W |
| | | | H | | | | | | | | | | |
| 49 | D711 | | I | I | I | D | D | I | D | D | D | D | D |
| 50 | M714 | | L | L | L | L | L | L | L | L | L | L | L |
| 51 | D719 | | G | G | G | G | G | G | G | G | G | G | G |
| 52 | L728 | | A | A | A | A | A | A | A | A | A | A | A |
| 53 | Y730 | | H | Y | H | Y | H | H | Y | H | Y | Y | Y |
| 54 | Q736 | | E | E | E | E | E | E | E | E | E | E | E |
| 55 | A740 | | M | A | A | M | M | A | M | A | M | M | M |
| 56 | Q753 | | W | W | W | W | W | W | W | W | W | W | W |
| 57 | Q758 | | T | Q | T | T | T | T | T | T | T | T | T |
| 58 | K760 | | R | R | R | R | R | R | R | R | R | R | R |
| 59 | Q761 | | T | T | T | T | T | T | T | T | T | T | T |
| 60 | Y763 | | F | F | F | F | F | F | F | F | F | F | F |
| 61 | K764 | | H | H | H | H | H | H | H | H | H | H | H |
| 62 | P767 | | S | S | S | S | S | S | S | S | S | S | S |
| 63 | L823 | | S | L | L | L | L | L | S | S | S | S | S |
| 64 | I824 | | S | S | S | S | S | S | S | S | S | S | S |
| 65 | A826 | | H | H | H | H | H | H | A | A | A | A | A |
| 66 | K828 | | D | D | D | D | D | D | K | K | K | K | K |
| 67 | F829 | | S or | S | S | S | S | S | A | A | A | A | A |
| | | | A | | | | | | | | | | |
| 68 | N830 | | R or | R | H | R | H | H | N | N | N | N | N |
| | | | H | | | | | | | | | | |
| 69 | T833 | | N | N | N | N | N | N | N | N | N | N | N |
| 70 | V834 | | I | I | I | I | I | I | I | I | I | I | I |
| 71 | P836 | | S | S | S | S | S | S | S | S | S | S | S |
| 72 | P837 | | S or | S | S | S | S | S | S | H | S | H | S |
| | | | H | | | | | | | | | | |
| 73 | M843 | | L | L | L | L | L | L | L | L | L | L | L |
| 74 | Q846 | | E | E | E | E | E | E | E | E | E | E | E |
| 75 | Y847 | | F | F | F | F | F | F | F | F | F | F | F |
| 76 | S858 | | A | A | A | A | A | A | A | A | A | A | A |
| 77 | W860 | | H or | W | H | W | T | W | W | T | S | W | W |
| | | | T or | | | | | | | | | | |
| | | | S | | | | | | | | | | |
| 78 | T861 | | S | S | T | S | T | S | S | T | T | S | T |
| 79 | G863 | | T or | T | T | T | L | L | T | L | I | L | L |
| | | | L or | | | | | | | | | | |
| | | | I | | | | | | | | | | |
| 80 | A866 | | H | H | H | A | H | A | A | H | H | H | A |
| 81 | L868 | | S or | L | S | L | C | L | L | C | L | L | L |
| | | | C | | | | | | | | | | |
| 82 | Q869 | | N | N | N | N | N | N | N | N | N | N | N |
| 83 | F872 | | W | W | W | W | W | W | W | W | W | W | W |
| 84 | A873 | | W | A | W | W | W | W | W | W | W | A | A |
| 85 | M874 | | Vor | V | A | A | A | A | A | A | A | E | V |
| | | | A or | | | | | | | | | | |
| | | | E | | | | | | | | | | |
| 86 | Y878 | | W or | W | W | W | W | W | W | Q | W | W | W |
| | | | Q | | | | | | | | | | |
| 87 | N881 | | A or | A | A | A | A | K | A | A | A | A | A |
| | | | K | | | | | | | | | | |
| 88 | Q887 | | E | E | E | E | E | E | E | E | E | E | E |
| 89 | N888 | | W | N | N | N | N | W | N | N | N | N | N |
| 90 | Y891 | | A | A | A | A | A | A | A | A | A | A | A |
| 91 | E892 | | K or | K | K | K | K | I | K | K | K | K | K |
| | | | I | | | | | | | | | | |
| 92 | N934 | | D or | D | D | D | A | D | A | A | A | A | A |
| | | | A | | | | | | | | | | |
| 93 | T935 | | E or | E | E | E | E | E | E | E | E | E | Q |
| | | | Q | | | | | | | | | | |
| 94 | V937 | | E | E | E | E | E | E | E | E | E | E | E |
| 95 | K938 | | R | R | R | R | R | R | K | K | K | K | K |
| 96 | Q939 | | E or | E | E | E | E | E | E | E | E | E | T |
| | | | T | | | | | | | | | | |
| 97 | R957 | | N or | N | N | N | N | N | N | H | N | N | N |
| | | | H | | | | | | | | | | |
| 98 | K960 | P | | P | P | P | P | P | P | P | P | P | P |
| 99 | V961 | P | | P | P | P | P | P | P | P | P | P | P |
| 100 | T972 | | L | L | L | L | L | L | L | L | L | L | L |
| 101 | Q976 | | M or | M | L | M | L | L | M | L | M | M | M |
| | | | L | | | | | | | | | | |
| 102 | S977 | | A | A | A | A | A | A | A | A | A | A | A |
| 103 | Q979 | | A | A | A | A | A | Q | A | Q | A | A | A |
| 104 | T980 | | A | A | A | A | A | A | A | A | A | A | A |
| 105 | Y981 | | F | F | F | F | F | F | F | F | F | F | F |
| 106 | Q984 | | A | A | A | A | A | A | A | A | A | A | A |
| 107 | L986 | | A | L | L | A | A | L | A | L | A | A | A |
| 108 | T1001 | | L | T | T | L | T | T | T | T | T | T | T |
| 109 | S1004 | | A or | A | R | R | R | R | R | R | R | R | R |
| | | | R | | | | | | | | | | |
| 110 | E1005 | | I | E | E | I | E | E | E | E | E | E | E |
| ill | L1008 | | A or | A | A | A | A | A | A | A | N | A | A |
| | | | N | | | | | | | | | | |
| 112 | R1013 | | L | L | L | L | L | L | L | L | L | L | L |
| 113 | V1014 | | W or | V | V | V | W | W | V | W | H | W | W |
| | | | H | | | | | | | | | | |
| 114 | D1015 | | G | G | G | G | G | G | G | G | G | G | G |
| 115 | K1019 | | E | E | E | E | E | E | E | E | E | E | E |
| 116 | Y1021 | | W or | W | W | W | W | W | W | F | W | W | F |
| | | | F | | | | | | | | | | |
| 117 | Y1041 | | L | L | L | L | L | L | L | Y | L | L | Y |
| 118 | P1043 | | A | A | A | A | A | A | A | A | A | A | A |
| 119 | A1044 | | G | G | G | G | G | G | G | G | G | G | G |
| 120 | E1046 | | T or | T | T | Y | T | L | Y | T | S | S | Y |
| | | | Y or | | | | | | | | | | |
| | | | L or | | | | | | | | | | |
| | | | S | | | | | | | | | | |
| 121 | P1053 | | L | L | P | P | P | P | P | P | P | L | L |
| 122 | F1063 | | I or | I | I | I | I | V | I | I | I | I | I |
| | | | V | | | | | | | | | | |
| 123 | R1065 | | S or | R | R | S | R | R | R | R | R | R | R |
| | | | R | | | | | | | | | | |
| 124 | E1066 | | N or | N | T | T | N | I | N | N | N | N | N |
| | | | T or | | | | | | | | | | |
| | | | I | | | | | | | | | | |
| 125 | V1068 | | T | V | V | V | V | V | V | T | T | V | V |
| 126 | R1081 | | E or | E | E | E | E | E | E | D | W | E | E |
| | | | D or | | | | | | | | | | |
| | | | W | | | | | | | | | | |
| 127 | N1082 | | Q or | Q | N | Q | E | Q | Q | N | E | Q | N |
| | | | E | | | | | | | | | | |
| 128 | E1085 | | F | E | E | E | E | F | E | E | E | E | E |
| 129 | Q1087 | | L | L | Q | Q | L | L | L | L | L | L | L |
| 130 | N1093 | | L | L | N | L | L | L | L | L | L | L | L |
| 131 | T1094 | | V | V | V | V | V | V | V | V | V | V | V |
| 132 | F1095 | | L or | L | F | I | L | L | L | L | L | L | L |
| | | | I | | | | | | | | | | |
| 133 | V1102 | | D | D | D | D | D | D | D | D | D | D | D |
| 134 | L1115 | | K | K | L | L | L | L | K | L | L | L | L |

Design with Evolutionary Constraints in the Rosetta PROSS Design Workflow:

[0493] The Protein Repair One-Stop Shop (or “PROSS”) provides an algorithm for computational design of sequences that should result in a protein having a desirable function such as, for example, improved expression levels, improved expression in E. coli or other heterologous systems, improved solubility, less misfolding (i.e., when the protein is innately soluble and folded, but in an inactive conformation), less aggregation, longer half-life in-vitro or in-vivo, or higher melting temperature (Tm) (HyperTextTransferProtocol Secure://pross.weizmann.ac.il/about/).

[0494] This study was to design mutations of the S protein from SARS CoV-2 using evolutionary constraints for the introduction of stabilizing residues.

[0495] Homologous sequences were obtained from the non-redundant BLAST database and narrowed to 500 glycoprotein sequences. These aligned sequences were calculated into a position-specific scoring matrix (PSSM) with the PSI-BLAST algorithm. The matrix represents the likelihood of the 20 amino acids being present at each residue position, within the aligned sequences.

[0496] The starting structure for the S antigen in the open conformation was built in RosettaCM and designed using an updated version of the PROSS algorithm (with symmetry restraints and the beta energy scoring function). Goldenzweig et al. 2016 Molecular Cell 63(2):337-346. The Rosetta FilterScan mover was used to perform single point mutagenesis of all the residues to the preferred PSSM mutations, targeting the S domain, N-terminal domain (NTD) plus S2 domain, or the S2 domain only. The mutation scan was binned within twelve different energy thresholds (−0.5, −1, −1.5, −2, −2.5, −3, −3.5, −4, −4.5, −5, −5.5, −6 kcal/mol) to increase mutation sequence diversity (FIG. 3). For example, a combination of −6 kcal/mol single point mutations would result in fewer mutations due to a higher energetic barrier for introducing new mutations.

[0497] A RosettaScripts algorithm that energetically combined the proposed single mutations was used to reduce the search space, yielding twelve total stabilizing designs for each round of mutations, and representing each energy threshold (FIG. 3).

[0498] In summary, the design protocol performs an alignment to non-redundant glycoprotein sequences in the BLAST database, followed by single point mutagenesis (at different energy thresholds: −0.5, −1, −1.5, −2, −2.5, −3, −3.5, −4, −4.5, −5, −5.5, −6 kcal/mol) and combinatorial design to yield the most stabilizing residues (highlighted in cyan).

### Results:

[0499] In Table 2 are provided (from left column to right): certain target residues of wild type SARS-CoV-2 amino acid sequence SEQ ID NO: 3; certain target residues of control SARS-CoV-2 amino acid sequence SEQ ID NO: 4; the presently provided point mutations of those target residues which were designed with PROSS (“PROSS mutations”) to increase the (thermo)stability of the wild type (SEQ ID NO: 3) or control (SEQ ID NO: 4) S proteins; and then a summary of what amino acids are present at those target residue positions within the designed, modified S protein fragment sequences SEQ ID NOs: 15-29. The sequence SEQ ID NO: 4 was used as the “parent” sequence for modified S proteins comprising PROSS mutations, so all of sequences SEQ ID NO: 15-29 comprise the furin cleavage abrogation mutations and prefusion double proline mutations that SEQ ID NO: 4 comprises. Further, SEQ ID NOs: 17, 19, and 22-29 also comprise the D588G consensus mutation that is within SEQ ID NO: 4.

TABLE 2

| | | | | | | | | | | Column | Column | Column | Column | Column | Column | Column | Column | Column |
|---|---|---|---|---|---|---|---|---|---|---|---|---|---|---|---|---|---|---|
| | Column #1 | Column #2 | Column #3 | Column #4 | Column #5 | Column #6 | Column #7 | Column #8 | Column #9 | #10 | #11 | #12 | #13 | #14 | #15 | #16 | #17 | #18 |
| | SEQ ID | SEQ ID | PROSS | SEQ ID | SEQ ID | SEQ ID | SEQ ID | SEQ ID | SEQ ID | SEQ ID | SEQ ID | SEQ ID | SEQ ID | SEQ ID | SEQ ID | SEQ ID | SEQ ID | SEQ ID |
| Row # | NO: 3 | NO: 4 | Mutations | NO: 15 | NO: 16 | NO: 17 | NO: 18 | NO: 19 | NO: 20 | NO: 21 | NO: 22 | NO: 23 | NO: 24 | NO: 25 | NO: 26 | NO: 27 | NO: 28 | NO: 29 |
| 3 | T7 | | R | R | T | T | T | T | R | T | T | T | T | T | T | T | T | T |
| 4 | V16 | | I | V | V | V | V | V | I | V | V | V | V | V | V | V | V | V |
| 5 | S20 | | N | N | N | N | N | N | N | N | N | N | N | S | S | S | S | S |
| 6 | S24 | | L | L | L | L | L | L | L | L | L | L | L | S | S | S | S | S |
| 7 | H43 | | N | N | N | H | H | H | N | N | H | H | H | H | H | H | H | H |
| 8 | S68 | | A | A | S | S | S | S | A | S | S | S | S | S | S | S | S | S |
| 9 | S72 | | N | S | S | S | S | S | N | S | S | S | S | S | S | S | S | S |
| 10 | T82 | | S | S | T | T | T | T | S | T | T | T | T | T | T | T | T | T |
| 11 | S90 | | T | T | S | S | S | S | T | S | S | S | S | S | S | S | S | S |
| 12 | A97 | | G | G | G | G | A | A | G | G | G | A | A | A | A | A | A | A |
| 13 | V100 | | I | V | V | V | V | V | I | V | V | V | V | V | V | V | V | V |
| 14 | K103 | | R | R | R | R | K | K | R | R | R | K | K | K | K | K | K | K |
| 15 | Q108 | | N | N | N | Q | Q | Q | N | N | N | Q | Q | Q | Q | Q | Q | Q |
| 16 | N111 | | E | E | E | E | E | E | E | E | E | E | E | N | N | N | N | N |
| 17 | D112 | | N | D | N | D | D | D | N | N | D | D | D | D | D | D | D | D |
| 18 | M127 | | L or S | L | M | M | M | M | S | M | M | M | M | M | M | M | M | M |
| 19 | E130 | | G | G | G | G | E | E | G | G | G | E | E | E | E | E | E | E |
| 20 | R132 | | H | H | H | H | H | H | H | H | H | H | H | R | R | R | R | R |
| 21 | S135 | | D or T | D | T | S | S | S | D | T | S | S | S | S | S | S | S | S |
| 22 | Q147 | | H | H | H | Q | Q | Q | H | H | Q | Q | Q | Q | Q | Q | Q | Q |
| 23 | L150 | | I | I | I | L | L | L | I | I | L | L | L | L | L | L | L | L |
| 24 | K156 | | D | D | D | D | K | K | D | D | D | K | K | K | K | K | K | K |
| 25 | Q157 | | S | S | S | S | Q | Q | S | S | S | Q | Q | Q | Q | Q | Q | Q |
| 26 | N162 | | H | H | H | N | N | N | H | H | N | N | N | N | N | N | N | N |
| 27 | V167 | | I | I | I | I | V | V | I | I | I | V | V | V | V | V | V | V |
| 28 | Y174 | | W | W | W | W | Y | Y | W | W | W | Y | Y | Y | Y | Y | Y | Y |
| 29 | K176 | | H or L | H | H | H | K | K | L | K | H | H | K | K | K | K | K | K |
| 30 | K180 | | S | S | K | K | K | K | S | K | K | K | K | K | K | K | K | K |
| 31 | R188 | | T | T | T | R | R | R | T | T | R | R | R | R | R | R | R | R |
| 32 | Q192 | | A or E | A | A | E | E | Q | A | A | E | E | Q | Q | Q | Q | Q | Q |
| 33 | P199 | | L | L | L | P | P | p | L | L | P | P | P | P | P | P | P | P |
| 34 | T214 | | I | I | I | I | I | I | I | I | I | I | I | T | T | T | T | T |
| 35 | S229 | | R | R | R | R | R | S | R | R | R | R | S | S | S | S | S | S |
| 36 | A234 | | R | R | R | R | A | A | R | R | R | A | A | A | A | A | A | A |
| 37 | A238 | | V | V | V | A | A | A | V | V | V | A | A | A | A | A | A | A |
| 38 | N254 | | D | N | N | N | N | N | D | N | N | N | N | N | N | N | N | N |
| 39 | S271 | | A | A | A | S | S | S | A | A | A | S | S | S | S | S | S | S |
| 40 | Q295 | | R | R | Q | Q | Q | Q | R | Q | Q | Q | Q | Q | Q | Q | Q | Q |
| 41 | P311 | | D | D | D | D | D | D | P | P | P | P | P | P | P | P | P | P |
| 42 | G313 | | S or D | S | S | D | D | S | G | G | G | G | G | G | G | G | G | G |
| 43 | V341 | | S | S | S | V | V | V | V | V | V | V | V | V | V | V | V | V |
| 44 | A346 | | T | T | T | T | T | T | A | A | A | A | A | A | A | A | A | A |
| 45 | K352 | | H or W | H | K | W | K | K | K | K | K | K | K | K | K | K | K | K |
| 46 | S357 | | D | D | D | S | S | S | S | S | S | S | S | S | S | S | S | S |
| 47 | T359 | | K | K | T | T | T | T | T | T | T | T | T | T | T | T | T | T |
| 48 | I384 | | L | L | L | L | L | L | I | I | I | I | I | I | I | I | I | I |
| 49 | K391 | | E | E | E | E | E | K | K | K | K | K | K | K | K | K | K | K |
| 50 | S417 | | A | A | A | A | A | S | S | S | S | S | S | S | S | S | S | S |
| 51 | K418 | | R | R | R | R | R | R | K | K | K | K | K | K | K | K | K | K |
| 52 | V419 | | K | K | K | V | V | V | V | V | V | V | V | V | V | V | V | V |
| 53 | G420 | | S | S | S | S | S | G | G | G | G | G | G | G | G | G | G | G |
| 54 | K432 | | N or H | N | H | K | K | K | K | K | K | K | K | K | K | K | K | K |
| 55 | S433 | | G | G | G | G | G | G | S | S | S | S | S | S | S | S | S | S |
| 56 | K436 | | R | R | R | R | K | K | K | K | K | K | K | K | K | K | K | K |
| 57 | A449 | | L | L | A | A | A | A | A | A | A | A | A | A | A | A | A | A |
| 58 | S451 | | D | D | D | S | S | S | S | S | S | S | S | S | S | S | S | S |
| 59 | G470 | | D or N | D | D | D | N | G | G | G | G | G | G | G | G | G | G | G |
| 60 | V477 | | S | S | S | S | S | V | V | V | V | V | V | V | V | V | V | V |
| 61 | G478 | | E or S | E | S | H | G | G | G | G | G | G | G | G | G | G | G | G |
| 62 | A494 | | G | G | G | G | G | A | A | A | A | A | A | A | A | A | A | A |
| 63 | S504 | | N | N | N | N | N | N | S | S | S | S | S | S | S | S | S | S |
| 64 | N506 | | S | S | S | N | N | N | N | N | N | N | N | N | N | N | N | N |
| 65 | N518 | | Y | Y | Y | Y | N | N | N | N | N | N | N | N | N | N | N | N |
| 66 | L520 | | Y | Y | Y | Y | Y | L | L | L | L | L | L | L | L | L | L | L |
| 67 | P535 | | S | S | S | S | S | S | P | P | P | P | P | P | P | P | P | P |
| 68 | Q538 | | L | L | L | Q | Q | Q | Q | Q | Q | Q | Q | Q | Q | Q | Q | Q |
| 69 | I543 | | S | S | S | S | S | S | I | I | I | I | I | I | I | I | I | I |
| 70 | A544 | | S | S | A | A | A | A | A | A | A | A | A | A | A | A | A | A |
| 71 | L556 | | N | N | N | N | N | N | L | L | L | L | L | L | L | L | L | L |
| 72 | L559 | | Y | Y | Y | Y | L | L | L | L | L | L | L | L | L | L | L | L |
| 73 | N577 | | D | D | N | N | N | N | D | N | N | N | N | N | N | N | N | N |
| 74 | Q581 | | E | E | Q | Q | Q | Q | E | Q | Q | Q | Q | Q | Q | Q | Q | Q |
| 75 | D588 | G | N | N | N | G | N | G | N | N | G | G | G | G | G | G | G | G |
| 76 | T592 | | S | S | T | T | T | T | S | T | T | T | T | T | T | T | T | T |
| 77 | V596 | | T | V | V | V | V | V | T | V | V | V | V | V | V | V | V | V |
| 78 | D601 | | N | N | N | D | D | D | N | N | D | D | D | D | D | D | D | D |
| 79 | V609 | | R | R | R | R | R | V | R | R | R | R | V | V | V | V | V | V |
| 80 | V616 | | I | I | I | V | V | V | I | I | I | V | V | V | V | V | V | V |
| 81 | H629 | | F or Y | F | Y | Y | H | H | F | H | Y | Y | H | H | H | H | H | H |
| 82 | Q649 | | D | D | D | D | D | Q | D | D | D | D | Q | Q | Q | Q | Q | Q |
| 83 | P655 | | R | P | P | P | P | p | R | P | P | P | p | p | p | p | p | p |
| 84 | R656 | G | | G | G | G | G | G | G | G | G | G | G | G | G | G | G | G |
| 85 | R657 | S | | S | S | S | S | S | S | S | S | S | S | S | S | S | S | S |
| 86 | R659 | S | | S | S | S | S | S | S | S | S | S | S | S | S | S | S | S |
| 87 | A675 | | S or E | S | S | E | A | A | S | S | E | A | A | S | S | E | E | A |
| 88 | A680 | | S | S | S | S | A | A | S | S | S | A | A | S | S | S | A | A |
| 89 | S682 | | D | S | S | S | S | S | S | S | D | S | S | S | S | D | S | S |
| 90 | N684 | | D or T | D | D | N | N | N | T | D | N | N | N | D | D | N | N | N |
| 91 | L701 | | I | I | I | I | I | I | I | I | I | I | I | I | I | I | I | I |
| 92 | T706 | | P or Q | P | Q | Q | Q | P | P | Q | Q | Q | P | P | Q | Q | Q | P |
| 93 | T708 | | V | V | V | V | T | T | V | V | V | T | T | V | V | V | V | T |
| 94 | T713 | | K | K | K | T | T | T | K | K | T | T | T | K | K | T | T | T |
| 95 | S720 | | H | H | H | H | S | S | H | H | H | S | S | H | H | H | S | S |
| 96 | T721 | | S or E | S | S | E | T | T | S | S | S | T | T | S | S | S | E | T |
| 97 | S724 | | K | S | S | S | S | S | K | S | S | S | S | S | S | S | S | S |
| 98 | T742 | | H | H | H | H | H | T | H | H | H | H | T | H | H | H | H | T |
| 99 | G743 | | E | E | E | E | E | E | E | E | E | E | E | E | E | E | E | E |
| 100 | V746 | | E | E | E | V | V | V | E | E | V | V | V | E | E | V | V | V |
| 101 | T752 | | M or L | M | T | T | T | T | L | T | T | T | T | M | T | T | T | T |
| 102 | Q753 | | L or R | L | L | Q | Q | Q | R | L | L | Q | Q | R | L | L | Q | Q |
| 103 | K760 | | R | R | K | K | K | K | R | K | K | K | K | R | K | K | K | K |
| 104 | Q778 | | L | L | L | Q | Q | Q | L | L | Q | Q | Q | L | L | Q | Q | Q |
| 105 | P786 | | S | S | S | S | S | S | P | P | P | P | P | P | P | P | P | P |
| 106 | F791 | | A | A | A | A | F | F | A | A | A | F | F | A | A | A | A | F |
| 107 | T801 | | K | K | K | T | T | T | K | K | T | T | T | K | K | T | T | T |
| 108 | K809 | | E | E | E | K | K | K | E | E | K | K | K | E | E | K | K | K |
| 109 | Q810 | | G | G | G | G | G | G | G | G | G | G | G | G | G | G | G | G |
| 110 | Q846 | | A | A | A | A | A | A | A | A | A | A | A | A | A | A | A | A |
| 111 | S849 | | A | A | A | S | S | S | A | A | S | S | S | A | A | S | S | S |
| 112 | S858 | | A | A | A | A | A | A | A | A | A | A | A | A | A | A | A | A |
| 113 | A866 | | S | S | S | A | A | A | S | S | S | A | A | S | S | S | A | A |
| 114 | Q869 | | V | Q | Q | Q | Q | Q | Q | V | Q | Q | Q | Q | Q | Q | Q | Q |
| 115 | S903 | | K | K | A | A | A | A | A | A | A | A | A | A | A | A | A | A |
| 116 | K907 | | A | A | A | A | K | K | A | A | A | K | K | A | A | A | K | K |
| 117 | D910 | | E | E | E | D | D | D | E | E | D | D | D | E | E | D | D | D |
| 118 | S911 | | G | G | G | G | G | G | G | G | G | G | G | G | G | G | G | G |
| 119 | S913 | | D | D | D | D | S | S | D | D | D | S | S | D | D | D | S | S |
| 120 | S914 | | E or A | E | A | S | S | S | E | A | S | S | S | E | A | S | S | S |
| 121 | S917 | | E | E | E | S | S | S | E | E | S | S | S | E | E | S | S | S |
| 122 | Q931 | | E | Q | Q | Q | Q | Q | E | Q | Q | Q | Q | Q | Q | Q | Q | Q |
| 123 | V950 | | S | S | V | V | V | V | S | V | V | V | V | S | V | V | V | V |
| 124 | K960 | P | | P | P | P | P | P | P | P | P | P | P | P | P | P | P | P |
| 125 | V961 | P | | P | P | P | P | P | P | P | P | P | P | P | P | P | P | P |
| 126 | T972 | | N | N | N | N | N | N | N | N | N | N | N | N | N | N | N | N |
| 127 | S977 | | A | A | A | A | A | S | A | A | A | A | S | A | A | A | A | S |
| 128 | Q979 | | N | N | N | N | N | Q | N | N | N | N | Q | N | N | N | N | Q |
| 129 | Y981 | | F | F | F | Y | Y | Y | F | F | Y | Y | Y | F | F | Y | Y | Y |
| 130 | Q985 | | L | L | L | Q | Q | Q | L | L | L | Q | Q | L | L | L | Q | Q |
| 131 | N997 | | E | E | E | N | N | N | E | E | N | N | N | E | E | N | N | N |
| 132 | T1001 | | E | E | E | E | E | E | E | E | E | E | E | E | E | E | E | E |
| 133 | S1004 | | N | N | S | S | S | S | N | S | S | S | S | N | S | S | S | S |
| 134 | D1015 | | N | N | D | D | D | D | N | D | D | D | D | N | D | D | D | D |
| 135 | K1019 | | N | N | N | K | K | K | N | N | K | K | K | N | N | K | K | K |
| 136 | S1029 | | A | A | A | A | S | S | A | A | A | S | S | A | A | A | S | S |
| 137 | A1044 | | T | T | T | T | T | T | T | T | T | T | T | T | T | T | T | T |
| 138 | Q1045 | | S or D or E | S | D | Q | Q | Q | D | D | Q | Q | Q | E | D | Q | Q | Q |
| 139 | E1046 | | H or Y or F | H | Y | H | F | Y | H | Y | Y | Y | H | Y | Y | Y | Y | H |
| 140 | K1047 | | R | R | R | K | K | K | R | R | K | K | K | R | R | K | K | K |
| 141 | D1058 | | N | N | N | N | D | D | N | N | N | D | D | N | N | N | N | D |
| 142 | E1066 | | D | D | E | E | E | E | D | E | E | E | E | D | E | E | E | E |
| 143 | I1088 | | P | P | I | P | P | I | P | P | I | P | I | I | I | P | I | I |
| 144 | N1099 | | D | D | D | D | N | N | D | D | D | N | N | D | D | D | D | N |
| 145 | Q1116 | | K | Q | Q | Q | Q | Q | K | Q | Q | Q | Q | Q | Q | Q | Q | Q |

Design of Symmetric Interfaces with Evolutionary Constraints:

[0500] This study was to design mutations of the S antigen from SARS CoV-2 using optimized hydrogen bond networks and evolutionary constraints for the introduction of stabilizing residues.

[0501] The lowest energy structures from the previous HBNet design round, derived from structures of the S protein displaying the RBD in the open conformation (PDB Accession Numbers: 6VSB and 6VYB) and targeting mutations on the S or S2 domains, were used for evolutionary design in PROSS against sequences from the non-redundant BLAST database. PSSM matrices were generated for each of the HBNet structures and used for defining the design space during the PROSS protocol.

[0502] The starting structures from the HBNet models were designed with the Rosetta FilterScan mover, targeting single point mutations conserved in the evolutionary pool of sequences. The point mutation scan was binned within twelve different energy thresholds (−0.5, −1, −1.5, −2, −2.5, −3, −3.5, −4, −4.5, −5, −5.5, −6 kcal/mol), with each reduction in permitted energy leading to an increase mutation sequence diversity. Combinatorial design was performed on models in these binned energy thresholds, yielding twelve structures for each of the runs.

[0503] The top five structures (from energy thresholds −5.5 kcal/mol or −6 kcal/mol) were chosen from this combined HBNet-PROSS protocol, either targeting the full S protein or the S2 domain only. The full S HBNet-PROSS design did not yield better energetics than HBNet on its own, indicating the challenge of re-designing an already optimized interface (Cannon et al. 2020 Protein Science 29(4):919-929). The S2 domain targeted HBNet-PROSS mutagenesis yielded models that were more stable, per in silico energetics, than the HBNet designs alone (FIGS. 4A and 4B).

### Results:

[0504] Based on the modeled stability using HBNet or PROSS of modified S proteins comprising the mutations in Table 1 or 2, certain mutations were combined and are summarized in Table 3 (“HBNet-PROSS mutations”). Table 3 provides (from left column to right): certain target residues of wild type SARS-CoV-2 amino acid sequence SEQ ID NO: 3; certain target residues of control SARS-CoV-2 amino acid sequence SEQ ID NO: 4; the presently provided point mutations of those target residues which were designed with HBNet and PROSS to increase the (thermo)stability of the wild type (SEQ ID NO: 3) or control (SEQ ID NO: 4) S proteins; and then a summary of what amino acids are present at those target residue positions within the designed, modified S protein fragment sequences SEQ ID NOs: 30-34. The sequence SEQ ID NO: 4 was used as the “parent” sequence for modified S proteins comprising HBNet-PROSS mutations, so all of sequences SEQ ID NO: 30-34 comprise the furin cleavage abrogation mutations, prefusion double proline mutations, and D588G consensus mutation that SEQ ID NO: 4 comprises.

TABLE 3

| | | | Column | | | | | |
|---|---|---|---|---|---|---|---|---|
| | Column | Column | #3 | Column | Column | Column | Column | Column |
| | #1 | #2 | HBNet- | #4 | #5 | #6 | #7 | #8 |
| | SEQ ID | SEQ ID | PROSS | SEQ ID | SEQ ID | SEQ ID | SEQ ID | SEQ ID |
| Row # | NO: 3 | NO: 4 | mutations | NO: 30 | NO: 31 | NO: 32 | NO: 33 | NO: 34 |
| 3 | Q581 | | E | Q | Q | Q | Q | E |
| 4 | D588 | G | | G | G | G | G | G |
| 5 | R656 | G | | G | G | G | G | G |
| 6 | R657 | S | | S | S | S | S | S |
| 7 | R659 | S | | S | S | S | S | S |
| 8 | P689 | | A | A | A | A | A | A |
| 9 | T706 | | S | T | T | T | T | S |
| 10 | D719 | | G | G | G | G | G | G |
| 11 | G743 | | E | E | E | E | E | E |
| 12 | Q778 | | L | Q | L | L | L | Q |
| 13 | F791 | | A | A | A | A | A | A |
| 14 | T801 | | K | K | K | K | K | K |
| 15 | Q810 | | G | G | G | G | G | G |
| 16 | L823 | | S | S | S | S | S | S |
| 17 | V834 | | I | I | I | I | I | I |
| 18 | P836 | | S | S | S | S | S | S |
| 19 | P837 | | S or H | S | H | S | H | S |
| 20 | Q846 | | A | A | A | A | A | A |
| 21 | Y847 | | F | F | F | F | F | F |
| 22 | S858 | | A | A | A | A | A | A |
| 23 | N881 | | A | A | A | A | A | A |
| 24 | S903 | | N or K | N | N | N | N | K |
| 25 | S911 | | G | G | G | G | G | G |
| 26 | R957 | | N or H | N | H | N | N | N |
| 27 | K960 | P | | P | P | P | P | P |
| 28 | V961 | P | | P | P | P | P | P |
| 29 | L986 | | A | A | L | A | A | A |
| 30 | R1013 | | L | L | L | L | L | L |
| 31 | P1043 | | A | A | A | A | A | A |
| 32 | A1044 | | T | T | T | T | T | T |
| 33 | E1046 | | Y | Y | Y | Y | Y | Y |
| 34 | N1093 | | L | L | L | L | L | L |

[0505] Designed Disulfide Bonds to Stabilize “closed conformation” SARS-CoV-2 Spike (S) Protein: The cryo-EM structures of SARS-CoV-2 S protein revealed the presence of multiple conformational states corresponding to different organizations of the Receptor Binding Domains (RBDs) (Wrapp et al. 2020 Science 367(6483): 1260-1263 and Walls et al. 2020 Cell 181(2): 281-292.e6). Approximately half of the particles collected presented the trimeric S with a single RBD opened (or in “Up” position), whereas the remaining half was either in closed conformation (all RBD in “down” position) or with two RBD opened (“Up-Up-Down”). This conformational variability of RBDs was also found with SARS-CoV-1 S and MERS-CoV S trimers (Gui et al. 2017 Cell Research 27:119-129; Kirchdoerfer et al., 2018 Sci Rep 8:17823, 11 pgs.; Pallesen et al., 2017 PNAS E7348-E7357 available at WorldWideWeb.pnas.org/cgi/doi/10.1073/pnas.1707304114; Song et al., 2018 PLoS Path 14(8):e1007236, 19 pgs.; Walls et al., 2019 Cell 176:1026-1039; Yuan et al. 2017 Nat. Comm. 8(15092), 9 pgs & Suppl. Materials). SARS-CoV-1 S-RBD and MERS-CoV S-RBD were found to be a major target for neutralizing antibodies (NAbs), with the most potent competing with receptor binding, ACE2 and DPP4, respectively. The majority of SARS-Cov-2 neutralizing antibodies, identified from the sera of convalescent patients, target RBD directly competing with ACE-2 receptor (HypertTextTransferProtocol://opig.stats.ox.ac.uk/webapps/coronavirus/index.html). In particular, two antibodies, CR3022 and S309 isolated from SARS-CoV-1 patients, were able to bind both SARS-CoV-1 S-RBD and SARS-CoV-2 S-RBD (Yuan et al., 2020 Science 368(6491): 630-633; and Pinto et al., 2020 Nature HyperTextTransferProtocolSecure://doi.org/10.1038/s41586-020-2349-y). While CR3022 had poor neutralizing activity for SARS-CoV-2, S309 showed potent neutralization. Yuan et al., 2020 Science 368(6491): 630-633. Structural studies revealed that CR3022 binds to a “cryptic” RBD epitope that is not accessible in the closed conformation, while S309 epitope is always accessible and does not overlap with receptor binding site. Yuan et al., 2020 Science 368(6491): 630-633; Tian et al. 2020 Emerg. Microbes Infect. 9:382-385. Although these are still limited evidences, they suggest that open conformation might present more non-neutralizing epitopes than the closed conformation (or the open conformation may occur less frequently for these antibodies to neutralize as efficiently), something that has been reported also for HIV-1 envelope spike (Cai et al., 2017 PNAS 114(17):4477-4482). In rare cases, pathogen-specific antibodies can promote pathology, resulting in the phenomenon known as Antibody-Dependent-Enhancement (ADE) (discussed herein above), which has been reported for several viruses including dengue virus and also for SARS-CoV-1. For SARS-CoV-1, ADE in animal models is mediated by pre-existing SARS-CoV-1-specific antibodies that may promote viral entry into Fc receptor (FcRs) expressing cells such as monocytes, macrophages and B cells. This mechanism is entirely independent of ACE2 expression. Although infection of macrophages does not seem to result in productive viral replication, internalization of virus-antibody immune complexes can promote inflammation and tissue injury (Yasui et al., 2008 Cytokine 41(3):302-306; Juame et al., 2011 J. Virol. 85:10582-10597; Wang et al., 2014 Circ Res. 114(3):421-433). Recently, two NAbs, S230 and Mersmab1 targeting, respectively, SARS-CoV-1 S-RBD and MERS-CoV S-RBD have been shown to inhibit receptor binding (Wan et al., 2020 J. of Virol 94(7):e00127-20, 9 pgs.; Walls et al., 2019 Cell 176:1026-1039) Interestingly, S230 binding triggered the SARS-CoV S transition to the postfusion conformation, functionally mimicking ACE2 activity, while Mersmab1 mediated MERS-CoV pseudovirus entry into Fc receptor-expressing human cells. These data indicate that ADE of coronaviruses might be promoted by NAbs targeting specific epitopes on RBD involved in receptor binding. Thus, future trials with SARS-CoV-2 S antigen would need to evaluate ADE phenomenon to assess vaccine safety, eventually reconsidering the design of the antigen may be required. RBD can bind to the receptor only in the “Up” position, as well as to NAbs competing with receptor binding, suggesting that SARS-CoV-2 S antigen in closed conformation would not raise such kind of NAbs. In addition, a closed conformation would hide potential non-neutralizing epitopes as discussed above. Overall, SARS-CoV-2 S in closed conformation should have unique immunogenic profile, which has not been characterized yet. However, closed and open conformations are in dynamic equilibrium and forcing either one of these states requires engineering the S protein antigen. The inventors provide that disulfide bonds may be introduced at certain RBD interfaces to stabilize the SARS-CoV-2 S protein or S protein fragments.

[0506] Structure of closed SARS-CoV-2 S protein (PDB Accession Number 6VXX; Walls et al. 2020 Cell 181(2): 281-292.e6) was analyzed by PISA (HyperTextTransferProtocolSecure://www.ebi.ac.uk/pdbe/pisa/) to search for RBD residues involved in interfaces interaction. Residues selected by PISA were manually analyzed with PyMol and divided into surface patches. Surface patches were run through MOE (Molecule Operating Environment, WorldWideWeb.chemcomp.com) to find proximal inter- and intra-chain residues that could be substituted by cysteines in order to form stabilizing disulfide bonds. Among the disulfide bonds (DS) created by MOE, six were selected after visual inspection, four inter-chain and two intra-chain respectively.

### Results:

[0507] The S protein comprising the control sequence SEQ ID NO: 4 or certain of the above stabilized mutant sequences (SEQ ID NOs: 5, 10, 24, 29, and 30) was selected for further stabilization by adding Disulfide Bridge Mutations to it. See Table 5. Table 4 summarizes which so-called “parent” sequences (SEQ ID NOs: 4, 5, 10, 24, 29, or 30) were used to generate the designed S protein sequences comprising disulfide bridge mutations (i.e., SEQ ID NOs: 35-64). Some of the positions at which a disulfide bridge mutation may be inserted corresponds to the position at which an HBNet or PROSS mutation may be inserted (see above Tables 1-2 and S357D [SEQ ID NOs: 15-16]; Q538L [SEQ ID NOs: 5-9, 15-16]; I824S [SEQ ID NOs: 5-14]; and P836S [SEQ ID NOs: 5-14, 30-34]). Sequences described above that include an HBNet or PROSS mutation at S357, Q538, 1824, or P836 (numbered according to SEQ ID NO: 3) were not used here as a parent sequence for designing S protein sequences comprising a disulfide bridge mutation. The parent sequences used here all comprised the wild type amino acid residue at the cysteine substitution location (i.e., for all of SEQ ID NOs: 35-64, the wild type residue, which is the residue at the corresponding position within SEQ ID NO: 3, was mutated to cysteine (C)).

TABLE 4

| Parent Sequence | | SEQ ID NOs: Generated |
|---|---|---|
| SEQ ID NO: | Nomenclature | with That Parent Sequence |
| 4 | CoV2_S | 35-44 |
| 5 | CoV2_S_1_hbnet | 45, 50, 55, 60 |
| 10 | CoV2_S2_1_hbnet | 46, 51, 56, 61 |
| 24 | CoV2_S2_NTD_6_pross | 47, 52, 57, 62 |
| 29 | CoV2_S2_6_pross | 48, 53, 58, 63 |
| 30 | CoV2_S2_1_hbnet_pross | 49, 54, 59, 64 |

[0508] Table 5 provides (from left column to right): certain pairs of disulfide bridge mutations (i.e., (numbered according to wild type SARS-CoV-2 amino acid sequence SEQ ID NO: 3) which were designed to increase the stability of the wild type (SEQ ID NO: 3) or control (SEQ ID NO: 4) S proteins; the nomenclature affiliated with those disulfide bridge mutations (i.e., pairs of cysteine substitution mutations); and then a list of presently provided S protein amino acid sequences that comprise those disulfide bridge mutations.

TABLE 5

| Substitution Mutation Pairs | | SEQ ID NO: Comprising That |
|---|---|---|
| of SEQID NO: 3 | Nomenclature | Mutation Pair |
| 1744 C and A989C | openDS1 | 35, 45-49 |
| D813C and P836C | openDS2 | 36, 50-54 |
| A544C and S941C | openDS3 | 37, 55-59 |
| I824C and D560C | openDS4 | 38, 60-64 |
| G387C and V961C | closedDS1 | 39 |
| S357C and D959C | closedDS2 | 40 |
| V356C and R957C | closedDS3 | 41 |
| K15C and A494C | closedDS4 | 42 |
| A496C and N518C | closedDS5 | 43 |
| P495C and Q538C | closedDS6 | 44 |

[0509] Note that the S proteins in closed conformation surprisingly induced higher neutralizing antibodies than did the “2P” S protein in open conformation.

### Example 2: Receptor Binding Mutations

[0510] Modified S Proteins Fragments with RBD Knock-Out Mutation

[0511] This study was to design knockout mutations that inhibit the binding of the angiotensin-converting enzyme 2 (ACE2) receptor to the SARS CoV-2 S protein Receptor Binding Domain (RBD) using computational biophysics tools.

[0512] Starting from RBD structures bound by the ACE2 receptor (PDB Accession Numbers: 6M0J, 6VW1, and 6LZG), a combination of Rosetta, OSPREY, and free energy perturbation (FEP) algorithms were used to design single-point mutations that reduce ACE2 binding (Hallen et al. 2018 Computational Chemistry 39(30):2492-2507 regarding OSPREY; Clark et al. 2019 J M B 431(7):1481-1493 and Steinbrecher et al. 2017 J M B 429(7):948-964 for FEP algorithms). Antigens with reduced receptor binding might reduce the risk of eliciting antibodies that are ACE2-like (i.e. comparable to hACE), which have been shown to trigger conformational changes from pre to post-fusion in other coronaviruses, and might be part of a mechanism related to antibody-dependent enhanced (ADE) disease during the course of natural infection after vaccination.

[0513] The point mutations proposed by the interface design round, plus a few manually selected alanine mutations, were introduced into crystal structures of the SARS-2 RBD bound to ACE2 (PDB Accession Numbers: 6M0J, 6VW1, 6LZG) with a RosettaScripts algorithm, point_mutant_scan (Froning et al. 2020 Nat. Comm. 11(2330), HyperTextTransferProtocolSecure://doi.org/10.1038/s41467-020-16231-7, 14 pgs). The script calculates the energetics and dynamics of point mutagenesis, based on repacking and minimizing neighboring residues within a 10 Å sphere centered on the target mutation. The algorithm was updated to include interface energy analysis and the beta scoring function.

[0514] Based on the Rosetta energetics, some of the proposed interface mutations indicate reduced binding energy (more than 2 kcal/mol), relative to ACE2, while maintaining equivalent folding stability to the wildtype structure (in the apo/unbound form, FIG. 5).

### Results:

[0515] Certain residues of the wild type SARS-CoV-2 S protein Receptor Binding Domain (RBD) (P330-P531) were targeted for the insertion of substitution mutations designed to knock-out (prevent) binding to the S protein by an antibody comparable to ACE2. In Table 6 are provided (from left column to right): certain target residues of wild type SARS-CoV-2 amino acid sequence SEQ ID NO: 3; the inventor-designed substitution mutations of those target residues (called “RBD Knock-Out Mutations”) to knock-out (prevent) binding to the S protein by an antibody comparable to hACE2; and then a summary of the SEQ ID NO: for an exemplary betacoronavirus S protein amino acid sequence comprising that RBD knock-out mutation. The sequence SEQ ID NO: 4 was used as the “parent” sequence for the modified S protein sequences SEQ ID NOs: 65-104 (i.e., they also comprise the double proline prefusion mutations, furin abrogation mutations, and D588G consensus mutation present within the sequence SEQ ID NO: 4).

TABLE 6

| Column #1 | Column #1 | Column #1 |
|---|---|---|
| Target Residue in | RBD Knock- | SEQ ID NO: |
| SEQ ID NO: 3 | Out Mutations | Comprising Mutation |
| K391 | F | 65 |
| K391 | L | 66 |
| K391 | M | 67 |
| K391 | W | 68 |
| K391 | Y | 69 |
| Y423 | A | 70 |
| Y427 | A | 71 |
| L429 | A | 72 |
| L429 | H | 73 |
| L429 | M | 74 |
| L429 | N | 75 |
| L429 | W | 76 |
| F430 | H | 77 |
| F430 | I | 78 |
| F430 | W | 79 |
| F430 | Y | 80 |
| Y447 | W | 81 |
| A449 | M | 82 |
| G450 | T | 83 |
| F460 | H | 84 |
| F460 | I | 85 |
| F460 | L | 86 |
| F460 | M | 87 |
| F460 | N | 88 |
| F460 | P | 89 |
| F460 | T | 90 |
| F460 | W | 91 |
| F460 | Y | 92 |
| N461 | F | 93 |
| N461 | L | 94 |
| N461 | M | 95 |
| N461 | Q | 96 |
| Q467 | A | 97 |
| Q467 | Y | 98 |
| Q467 | F | 99 |
| Q467 | R | 100 |
| Q467 | M | 101 |
| Q467 | C | 102 |
| Q467 | G | 103 |
| Q467 | V | 104 |

### Introduction of Glycan Motifs to Mask ACE2/SARS CoV-2 S Protein RBD Binding Site:

[0516] This study was to design glycan based NxT mutations that mask the binding site of the human angiotensin-converting enzyme 2 (ACE2) receptor on the SARS CoV-2 receptor binding domain (RBD) using computational biophysics tools.

[0517] Interface residues between ACE2 and RBD were identified from Lan et al. (2020 Nature HyperTextTransferProtocolSecure://doi.org/10.1038/s41586-020-2180-5, 16 pgs). Rosetta comparative modeling was performed on x-ray structures of the RBD (PDB Accession Numbers: 6M0J, 6VW1, 6LZG), without the ACE2 receptor, to get a starting model to test folding stability. The lowest energy model from PDB Accession Number 6VW1 was chosen based on overall Rosetta statistics. The point_mutant_scan RosettaScripts algorithm was used to introduce mutations that would place an NxT motif at the following 10 interface sites (K417, Y449, Y453, L455, F456, Y473, A475, G476, N487, and Q493, numbered according to SEQ ID NO: 2—for clarity, these residues are where the NxT motif starts and are not necessarily the mutation locations).

[0518] Based on Rosetta folding energetics, the introduction of the 10 NxT motifs yielded different energy clusters relative to the wildtype: equivalent stability (K417, A475), slightly destabilizing (Y473, G476, N487, Q493), and more destabilizing (Y449, Y453, L455, F456) (FIG. 6).

### Results:

[0519] Certain residues were targeted in pairs but, in certain instances, it was only necessary to substitute one residue for introduction of the N—X-T motif (see SEQ ID NOs: 112 and 113). Table 7 provides (from left column to right): a first target residue “(A)” of wild type SARS-CoV-2 amino acid sequence SEQ ID NO: 3; the designed substitution mutation of that target residue (called “RBD Glycan Mutations”); as needed, a second target residue “(B)” of wild type SARS-CoV-2 amino acid sequence SEQ ID NO: 3; the inventor-designed RBD glycan mutation of that target residue; and then a summary of the SEQ ID NO: for a presently provided exemplary betacoronavirus S protein amino acid sequence that comprises that pair of RBD Glycan Mutations. The sequence SEQ ID NO: 4 was used as the “parent” sequence for the modified S protein sequences SEQ ID NOs: 105-114 (i.e., SEQ ID NOs: 105-114 also comprise the double proline prefusion mutations, furin abrogation mutations, and D588G consensus mutation present within the sequence SEQ ID NO: 4).

TABLE 7

| | | | | SEQ ID NO: |
|---|---|---|---|---|
| Target Residue | | Target Residue | | Comprising Those |
| (A) in SEQ ID | RBD Glycan | (B) in SEQ ID | RBD Glycan | Mutations of (A) |
| NO: 3 | Mutation of (A) | NO: 3 | Mutation of (B) | or (A) and (B) |
| K391 | N | A393 | T | 105 |
| Y423 | N | Y425 | T | 106 |
| Y427 | N | L429 | T | 107 |
| L429 | N | R431 | T | 108 |
| F430 | N | K432 | T | 109 |
| Y447 | N | A449 | T | 110 |
| A449 | N | S451 | T | 111 |
| G450 | N | | | 112 |
| Y463 | T | | | 113 |
| Q467 | N | Y469 | T | 114 |

[0520] The mutations of Examples 1 and 2 were thoughtfully designed to conserve putative S protein epitopes and tertiary/three-dimensional structure generally so that resultant mutant S proteins remain immunogenic (regarding SARS-CoV-2 epitopes, see Grifoni et al. 2020 Cell 181:1-13 and Supplementary Materials; Kiyotani et al. 2020 J. Hum. Genet. HyperTextTransferProtocolSecure://doi.org/10.1038/s10038-020-0771-5).

[0521] Without wishing to be bound by theory, it is believed that the SARS-CoV-2 Spike (S) protein modifications described here at Examples 1 and 2, when applied to corresponding positions within other betacoronavirus S proteins (such as a MERS-CoV or SARS-CoV-1 S protein), will have a comparable effect.

### Example 3: Assays to Confirm Antibody Binding and Enhanced Stability

[0522] The above-summarized, designed S proteins or S protein fragments can be cloned by recombinant DNA methods (in different combinations), then expressed, purified, and characterized for (i) antibody binding using surface plasmon resonance (SPR) and bio-layer interferometry (BLI) and (ii) thermostability, using differential scanning calorimetry (DSC) or differential scanning fluorimetry (DSF) assays.

[0523] Table 8 lists 30 designed S protein or protein fragments (S Stabilizing Constructs) that were used in in vitro assays to determine levels of cellular expression, antigenicity, and thermostability (FIGS. 7A-9C). On Table 8, each S Stabilizing Construct is listed along with its In silico identifier and SEQ ID NO. The computational designs were based on a SARS-1 structure (PDB: 6NB7), where all RBDs were in the open conformation. Experimental binding to ACE2 shows that there is at least 1 RBD that is in the open conformation. Cyro-EM structure to confirm this is currently not available.

TABLE 8

| S Stabilizing | | |
|---|---|---|
| Construct # | In silico identifier | SEQ ID NO: |
| 1 | COV2_S_1_hbnet | SEQ ID NO: 5-(CoV2_S_1_hbnet) mutant Spike |
| | | (S) protein amino acid sequence |
| 2 | COV2_S_2_hbnet | SEQ ID NO: 6-(CoV2_S_2_hbnet) mutant Spike |
| | | (S) protein amino acid sequence |
| 3 | COV2_S_3_hbnet | SEQ ID NO: 7-(CoV2_S_3_hbnet) mutant Spike |
| | | (S) protein amino acid sequence |
| 4 | COV2_S_4_hbnet | SEQ ID NO: 8-(CoV2_S_4_hbnet) mutant Spike |
| | | (S) protein amino acid sequence |
| 5 | COV2_S_5_hbnet | SEQ ID NO: 9-(CoV2_S_5_hbnet) mutant Spike |
| | | (S) protein amino acid sequence |
| 6 | COV2_S2_1_hbnet | SEQ ID NO: 10-(CoV2_S2_1_hbnet) mutant |
| | | Spike (S) protein amino acid sequence |
| 7 | COV2_S2_2_hbnet | SEQ ID NO: 11-(CoV2_S2_2_hbnet) mutant |
| | | Spike (S) protein amino acid sequence |
| 8 | COV2_S2_3_hbnet | SEQ ID NO: 12-(CoV2_S2_3_hbnet) mutant |
| | | Spike (S) protein amino acid sequence |
| 9 | COV2_S2_4_hbnet | SEQ ID NO: 13-(CoV2_S2_4_hbnet) mutant |
| | | Spike (S) protein amino acid sequence |
| 10 | COV2_S2_5_hbnet | SEQ ID NO: 14-(CoV2_S2_5_hbnet) mutant |
| | | Spike (S) protein amino acid sequence |
| 11 | COV2_S_1_pross | SEQ ID NO: 15-(CoV2_S_1_pross) mutant Spike |
| | | (S) protein amino acid sequence |
| 12 | COV2_S_2_pross | SEQ ID NO: 16-(CoV2_S_2_pross) mutant Spike |
| | | (S) protein amino acid sequence |
| 13 | COV2_S_3_5_pross | SEQ ID NO: 17-(CoV2_S_3_5_pross) mutant |
| | | Spike (S) protein amino acid sequence |
| 14 | COV2_S_5_pross | SEQ ID NO: 18-(CoV2_S_5_pross) mutant Spike |
| | | (S) protein amino acid sequence |
| 15 | COV2_S_6_pross | SEQ ID NO: 19-(CoV2_S_6_pross) mutant Spike |
| | | (S) protein amino acid sequence |
| 16 | COV2 _S2 _NTD_0_5_pross | SEQ ID NO: 20-(CoV2_S2_NTD_0_5_pross) |
| | | mutant Spike (S) protein amino acid sequence |
| 17 | COV2 _S2 _NTD_2_pross | SEQ ID NO: 21-(CoV2_S2_NTD_2_pross) |
| | | mutant Spike (S) protein amino acid sequence |
| 18 | COV2 _S2 _NTD_3_pross | SEQ ID NO: 22-(CoV2_S2_NTD_3_pross) |
| | | mutant Spike (S) protein amino acid sequence |
| 19 | COV2 _S2 _NTD_5_pross | SEQ ID NO: 23-(CoV2_S2_NTD_5_pross) |
| | | mutant Spike (S) protein amino acid sequence |
| 20 | COV2 _S2 _NTD_6_pross | SEQ ID NO: 24-(CoV2_S2_NTD_6_pross) |
| | | mutant Spike (S) protein amino acid sequence |
| 21 | COV2_S2_1_pross | SEQ ID NO: 25-(CoV2_S2_1_pross) mutant |
| | | Spike (S) protein amino acid sequence |
| 22 | COV2_S2_2_pross | SEQ ID NO: 26-(CoV2_S2_2_pross) mutant |
| | | Spike (S) protein amino acid sequence |
| 23 | COV2_S2_3_pross | SEQ ID NO: 27-(CoV2_S2_3_pross) mutant |
| | | Spike (S) protein amino acid sequence |
| 24 | COV2_S2_4_pross | SEQ ID NO: 28-(CoV2_S2_4_pross) mutant |
| | | Spike (S) protein amino acid sequence |
| 25 | COV2_S2_6_pross | SEQ ID NO: 29-(CoV2_S2_6_pross) mutant |
| | | Spike (S) protein amino acid sequence |
| 26 | COV2_S2_1_hbnet_pross | SEQ ID NO: 30-(CoV2_S2_1_hbnet_pross) |
| | | mutant Spike (S) protein amino acid sequence |
| 27 | COV2_S2_2_hbnet_pross | SEQ ID NO: 31-(CoV2_S2_2_hbnet_pross) |
| | | mutant Spike (S) protein amino acid sequence |
| 28 | COV2_S2_3_hbnet_pross | SEQ ID NO: 32-(CoV2_S2_3_hbnet_pross) |
| | | mutant Spike (S) protein amino acid sequence |
| 29 | COV2_S2_4_hbnet_pross | SEQ ID NO: 33-(CoV2_S2_4_hbnet_pross) |
| | | mutant Spike (S) protein amino acid sequence |
| 30 | COV2_S2_5_hbnet_pross | SEQ ID NO: 34-(CoV2_S2_5_hbnet_pross) |
| | | mutant Spike (S) protein amino acid sequence |

### Results

### Expression and Purification of Designed S Protein or S Protein Fragments:

[0524] The designed S protein fragments were produced in a high-throughput (HT) expression system (FIGS. 7A and 7B). For quantification of protein expression level, anti-His tag biosensors were dipped into harvest media in each transfection well. The initial binding slope of the mutant constructs to biosensor surface through his tag were measured and converted into concentration by using a standard curve.

[0525] The mutant constructs were assayed along with controls S-2P and/or HexaPro. The control S-2P corresponds to amino acid residues 1-1121 of SEQ ID NO:4, but with a D588 (Wrapp et al. 2020 Science 367(6483):1260-1263). The control polypeptide HexaPro (S-6P) corresponds to amino acid residues 1-1121 of SEQ ID NO:4, but with a D588 and proline substitutions (F817P, A892P, A899P, A942P) in addition to the two prolines as in S-2P construct (Hsieh et al. 2020 Science 369(6510): 1501-1505). S-2P (FIG. 1D) consists of two proline substitutions which stabilize the prefusion conformation. HexaPro (S-6P) contains four beneficial proline substitutions (F817P, A892P, A899P, A942P) in addition to the two proline existed in S-2P construct (Hsieh et al. 2020 Science 369(6510): 1501-1505; FIG. 1E). The proline substitutions stabilize the prefusion conformation and further shows higher levels of expression in comparison to S-2P (Hseih et al., 2020 Science 369 (6510: 1501-1505). HexaPro can also withstand heating and freezing (Hseih et al., 2020 Science 369 (6510: 1501-1505).

[0526] The Octet quantification assays (FIGS. 7A and 7B) were performed on Octet 96 Red system. Eight anti-HIS biosensors were presoaked in blank spent media for 10 minutes prior to the measurements. 200 μL standard samples were prepared in a black 96-well plate with S-2P or HexaPro standards diluted in media from 20 μg/mL to 0.3125 μg/mL. Standards and mutants binding curve on anti-HIS biosensor were measured. Initial binding rate of standards were plotted against the standards' known concentration to generate a standard calibration curve. This calibration curve is used to calculate the concentration of each mutant in media by fitting its measured initial binding rate to the calibration curve. The expression levels were measured in duplicate wells of each mutant's media and the average readout was reported.

### Results:

[0527] Among 30 of the designed mutants tested, #18 (SEQ ID NO: 22), 19 (SEQ ID NO: 23), 20 (SEQ ID NO: 24), 22 (SEQ ID NO: 26), 23 (SEQ ID NO: 27), 24 (SEQ ID NO: 28), and 25 (SEQ ID NO: 29) showed expression levels that were greater than the S-2P control polypeptide (FIG. 7A). Designed mutant #18 (SEQ ID NO: 22), 22 (SEQ ID NO: 26), 23 (SEQ ID NO: 27), and 24 (SEQ ID NO: 28) showed expression levels that were higher than 20 ug/ml, which was a seven-fold higher expression level when compared to S-2P (FIGS. 7A and 7B) and an over three-fold higher expression level when compared to HexaPro (FIG. 7B). Considering their high expression levels, these constructs were ideal constructs for further screening (antigenicity and thermostability) and scaling-up production. #19 (SEQ ID NO: 23), #25 (SEQ ID NO: 29) also show higher or equivalent expression level compared with hexaPro (FIG. 7B).

### Antibody Binding to Designed S Protein or S Protein Fragments:

[0528] The antigenicity of the designed S protein fragments were tested using a high-throughput binding screen in supernatant (Octet Bio-Layer Interferometry, BLI). The ACE 2 Receptor, CR3022 antibody (RBD Specific Antibody) was originally obtained from a person who, nearly two decades ago, survived a bout of severe acute respiratory syndrome (SARS). The SARS virus is closely related to the novel coronavirus that causes COVID-19. VRC 118 (NTD Specific Antibody), VRC 112 (S2 Specific Antibody), and S309 (Neutralizing Antibody that recognizes a proteoglycan epitope on the receptor-binding domain of SARS-Cov-2; the antibody is composed of 6 complementarity-determining regions (CDR) loops which come in contact with amino acids 337-344, 356-361, and 440-444 in the spike protein.) were used to test the conformational and antigenic integrity of the designs (FIGS. 8A-8E). VRC 112 and VRC 118 were obtained under an agreement with the National Institute of Allergy and Infectious Diseases (NIAID).

[0529] The Epitope Integrity Screening assays (FIGS. 8A-8D) were performed on Octet 384 system. SARS-CoV2 mAbs (CR3022, VRC-112 and VRC-118) and ACE2 receptor were loaded on 16 anti-human Fc biosensor at 10 μg/mL. mAb or ACE2-receptor coated biosensors were dipped into each mutant's raw harvest media, and the binding level against each mAb/ACE2 receptor were measured. A non-relevant RSV antigen spike-in media was used as negative control. A blank Expi293 media was used as blank subtraction. Binding levels were measured in duplicate well for each of the mutants' media and the average readout was reported.

[0530] The SPR experiment (FIG. 8E) was performed in a running buffer composed of 0.01 M HEPES pH 7.4, 0.15 M NaCl, 3 mM EDTA, 0.005% v/v Surfactant P20 at 25° C. using Biacore 8K (GE Healthcare) Series S protein A sensor chip (GE Healthcare) was used. Briefly, the SARS-COVID S specific antibodies or ACE2 receptor were immobilized to protein A sensor chip (GE Healthcare) at the ligand capture level, around 100RU. Serial dilutions of purified SARS-COVID S protein mutants were injected ranging in concentration from 10 nM to 1.25 nM. The resulting data were fit to a 1:1 binding model using Biacore Evaluation Software (GE Healthcare).

### Results:

[0531] The epitopes of constructs #18 (SEQ ID NO: 22), 19 (SEQ ID NO: 23), 20 (SEQ ID NO: 24), 22 (SEQ ID NO: 26), 23 (SEQ ID NO: 27), and 24 (SEQ ID NO: 28) were recognized by CR3022, S309, VRC-118, and their binding sites to ACE2 are not affected (FIG. 8E). #21 (SEQ ID NO: 25) shows a 17-fold affinity decrease to CR3022 and a 100-fold decrease to ACE2 receptor (FIG. 8E). The epitope recognized by VRC-112 was disrupted for all selected candidates (not shown) when measured on a supernatant sample by using the Biacore 8K as described above. When measured by SPR on purified proteins (and also using instrumentation/protocol that is more sensitive), better binding was achieved (data not shown)).

### Thermostability:

[0532] Nano Differential Scanning Fluorimetry (NanoDSF; FIGS. 9A-9C) was used to assess the thermal stability of purified SARS-COVID S protein mutants. Samples were diluted to 0.2 mg/mL by PBS and 20 μL of each sample was loaded into capillary tubes. Temperature ramp was set to 1° C./minute increase from 20° C. to 95° C. The reported values are the mean of 2^{nd} derivative of Ratio 350/330 from 3 independent measurements.

### Results:

[0533] Of the constructs selected for screening, #19 show highest increase in transition temperature 1 (Tₘ1), of 4.2° C., #22 show highest increase in transition temperature 2 (Tₘ2), of 9.1° C. (FIG. 10A-10C). S Stabilizing Construct #18 (SEQ ID NO: 22), 19 (SEQ ID NO: 23), 20 (SEQ ID NO: 24), and 21 (SEQ ID NO: 25) had Tₘ1's greater than the S control (FIG. 10B). S Stabilizing Construct #19 (SEQ ID NO: 23), 22 (SEQ ID NO: 26), 24 (SEQ ID NO: 28), and 25 (SEQ ID NO: 29) had Tₘ2's greater than the S control (FIG. 10C).

### Quaternary Structure of the Designed S Protein or S Protein Fragments:

[0534] High-performance liquid chromatography Size Exclusion Chromatography (HPLC SEC) was used to estimate the molecule size of purified SARS-COVID S mutants. 10 μL of purified SARS-COVID S mutants samples were injected into a Superdex 200 INCREASE 3.2/300 column and evaluated using an Alliance HPLC system at a flow rate of 0.1 ml/min. UV214 readings were obtained with a Photodiode Array Detector.

[0535] Dynamic Light Scattering (DLS) measurements were performed at 25° C. using a DynaPro Plate Reader II (Wyatt Technology). The samples were diluted in PBS, adjusted to 0.1 mg/ml, and filtered by 0.2 um membrane prior to analysis. The assay was performed in triplicate. DYNAMICS version 7 software from Wyatt Technology was used to analyze the data. The reported values are the mean value of 3 independent measurements.

### Results:

[0536] HPLC-SEC: #21 (SEQ ID NO: 25) peak shifts to a longer retention time compared with wild type S-2P positive control sample, indicating a lower molecular weight, which could be a S protein monomer. Other constructs, including #18 (SEQ ID NO: 22), 19 (SEQ ID NO: 23), 22 (SEQ ID NO: 26), 23 (SEQ ID NO: 27), and 24 (SEQ ID NO: 28) could be either S trimer, or mixture of trimer and higher degree oligomers.

[0537] DLS: #19 (SEQ ID NO: 23) and 23 (SEQ ID NO: 27) could be dimer of S trimer, while #21 (SEQ ID NO: 25) could be S monomer. #18 (SEQ ID NO: 22), 22 (SEQ ID NO: 26), and 24 (SEQ ID NO: 28) could be S trimer.

### Example 4—Additional Sequences

[0538] RNA sequences that encode polypeptides having the sequences reported in SEQ ID Nos: 125-134 were prepared with the goal of making sequences that have high expression and also retain antigenicity.

### Design of CoV-2 B.1.351 Lineage Spike Proteins:

[0539] The goal of this study is to perform stabilizing antigen design of spike proteins from coronavirus CoV-2 variant B.1.351 using evolutionary constraints and structural biophysics (PROSS). Symmetric minimization was performed on the closed conformation of the 2.7 Å CoV-2 spike glycoprotein (PDB: 7DF3), using cryo-EM density constraints and Rosetta Comparative Modeling (RosettaCM). The CoV-2 (Wuhan) sequence was mutated to the B.1.351 strain (20H/501Y.V2, a South African strain, Madhi et al. 2021 N Engl J Med 384: 1885-1898) with the D215G, K417N, E484K, N501Y D614G mutations. Mutagenesis with PROSS was focused on the S2 domain design with exposed or buried residues (less than 25% surface exposure) (FIG. 10),

### Results:

[0540] Ten constructs (SEQ ID NOs: 125-134) were generated from the PROSS protocol, focusing on full length B.1.351 spike glycoproteins, yielding five S2 designs (energy threshold: −0.5 kcal/mol, −1.5 kcal/mol, −3.5 kcal/mol, −4 kcal/mol, and −5.5 kcal/mol) and five buried S2 domain constructs (energy threshold: −1 kcal/mol, −1.5 kcal/mol, −3 kcal/mol, −5 kcal/mol, and −6 kcal/mol). These designs will be used as a further proof of principle for the S2 domain targeted PROSS method.

Determination of the Preclinical Immunogenicity of Six SARS-CoV2 Stabilized S Protein Designs Adjuvanted with AS03 in BALB/c Mice

### Mouse Immunizations

[0541] This in vivo study was performed to assess the preclinical immunogenicity of six new SARS-CoV2 stabilized S protein designs (designated as 18, 19, 21, 22, 23, and 24 in this study). Female BALB/c mice, 7-8 weeks of age at the start of the study, were immunized (N=10 mice/group) with AS03 adjuvanted-stabilized S proteins at two dosage levels of 3 μg and 0.3 μg. Control groups were also included in the study and consisted of saline placebo and AS03 adjuvanted-SARS-CoV2 S_2P protein administered at the same two dosage levels. Mice were injected intramuscularly twice in a 3 week period and bled 3 weeks after the initial immunization (post-I) and 2 weeks after the second immunization (post-II). The serum CoV2-specific antibody response was assessed using a pseudovirus neutralization assay to measure functional antibodies and an ELISA (pre-fusion S_2P protein absorbed to the solid phase) to measure IgG binding antibodies.

### Antibody Responses

[0542] All six stabilized S protein designs were immunogenic and induced robust serum neutralizing antibody and IgG binding antibody responses in mice (Tables 9-12). All SARS-CoV2 S immunized animals showed a dose response trend in neutralizing antibody titers following the second immunization (Tables 9 and 10). Interestingly, Design 19 elicited neutralizing antibody responses (GMT=153) post-I at the 3 μg dosage, as did Design 24 albeit to a lesser extent (GMT=37). For both Design 19 and Design 24, there was a dramatic boosting effect following the second immunization and the neutralizing antibody responses increased about 55-fold and 300-fold, respectively. The four other designs did not elicit detectable neutralizing antibody responses post-I at the 3 μg dosage which is consistent with the S_2P protein. None of the six stabilized S protein designs or the S_2P protein elicited neutralizing antibody responses post-I at the 0.3 μg dosage (Tables 9 and 10). All SARS-CoV2 immunized animals elicited strong IgG binding antibody responses after the initial immunization at both the 3 μg and 0.3 μg dosages, and this data also shows a dose response trend in IgG binding antibodies, although more subtle than the dose response trend seen with neutralizing antibodies (Tables 11 and 12). In addition, a strong boosting effect was seen in IgG binding antibodies following the second immunization.

TABLE 9
SARS-CoV2 PNA Titers 3 μg Dosage

| | | Geo- | | | Geo- | | |
|---|---|---|---|---|---|---|---|
| | | metric | | | metric | | |
| SEQ | | Mean | | | Mean | | |
| ID | | Titers | Lower | Upper | Titers | Lower | Upper |
| NO: | Design | Post-I | 95% Cl | 95% Cl | Post-II | 95% Cl | 95% Cl |
| | Saline | 13 | 13 | 13 | 13 | 13 | 13 |
| | CoV2 S 2P | 17 | 12 | 26 | 11000 | 6922 | 17481 |
| 22 | Design 18 | 28 | 16 | 48 | 6421 | 3602 | 11447 |
| 23 | Design 19 | 153 | 76 | 310 | 8488 | 5284 | 13635 |
| 25 | Design 21 | 18 | 13 | 26 | 3240 | 1555 | 6753 |
| 26 | Design 22 | 14 | 11 | 16 | 2212 | 1316 | 3718 |
| 27 | Design 23 | 27 | 18 | 41 | 4872 | 2632 | 9018 |
| 28 | Design 24 | 37 | 18 | 76 | 10802 | 6484 | 17995 |

TABLE 10
SARS-CoV2 PNA Titers 0.3 μg Dosage

| | | Geo- | | | Geo- | | |
|---|---|---|---|---|---|---|---|
| | | metric | | | metric | | |
| SEQ | | Mean | | | Mean | | |
| ID | | Titers | Lower | Upper | Titers | Lower | Upper |
| NO: | Design | Post-I | 95% Cl | 95% Cl | Post-II | 95% Cl | 95% Cl |
| | Saline | 13 | 13 | 13 | 13 | 13 | 13 |
| | CoV2 S 2P | 13 | 13 | 13 | 1105 | 602 | 2028 |
| 22 | Design 18 | 14 | 11 | 17 | 1865 | 1052 | 3307 |
| 23 | Design 19 | 18 | 11 | 28 | 4958 | 2537 | 9689 |
| 25 | Design 21 | 14 | 11 | 16 | 395 | 72 | 2173 |
| 26 | Design 22 | 13 | 13 | 13 | 425 | 218 | 830 |
| 27 | Design 23 | 19 | 11 | 33 | 1733 | 1047 | 2867 |
| 28 | Design 24 | 19 | 11 | 34 | 10057 | 5734 | 17637 |

TABLE 11
SARS-CoV2 S IgG Titers 3 μg Dosage

| | | Geo- | | | Geo- | | |
|---|---|---|---|---|---|---|---|
| | | metric | | | metric | | |
| SEQ | | Mean | | | Mean | | |
| ID | | Titers | Lower | Upper | Titers | Lower | Upper |
| NO: | Design | Post-I | 95% Cl | 95% Cl | Post-II | 95% Cl | 95% Cl |
| | Saline | 31 | 31 | 31 | 31 | 31 | 31 |
| | CoV2 S 2P | 9430 | 6816 | 13045 | 678441 | 530373 | 867846 |
| 22 | Design 18 | 12850 | 10991 | 15023 | 628363 | 536401 | 736092 |
| 23 | Design 19 | 22115 | 17367 | 28161 | 665249 | 557544 | 793759 |
| 25 | Design 21 | 3453 | 2589 | 4605 | 438477 | 339476 | 566348 |
| 26 | Design 22 | 9091 | 6511 | 12692 | 470081 | 357568 | 617997 |
| 27 | Design 23 | 17045 | 13467 | 21575 | 725806 | 503802 | 1045637 |
| 28 | Design 24 | 11763 | 8077 | 17132 | 889688 | 698385 | 1133393 |

TABLE 12
SARS-CoV2 S IgG Titers 0.3 μg Dosage

| | | Geo- | | | Geo- | | |
|---|---|---|---|---|---|---|---|
| | | metric | | | metric | | |
| SEQ | | Mean | | | Mean | | |
| ID | | Titers | Lower | Upper | Titers | Lower | Upper |
| NO: | Design | Post-I | 95% Cl | 95% Cl | Post-II | 95% Cl | 95% Cl |
| | Saline | 31 | 31 | 31 | 31 | 31 | 31 |
| | CoV2 S 2P | 1783 | 1377 | 2309 | 517622 | 420205 | 637624 |
| 22 | Design 18 | 3665 | 2892 | 4646 | 445005 | 368479 | 537425 |
| 23 | Design 19 | 5823 | 4256 | 7968 | 518079 | 459324 | 584350 |
| 25 | Design 21 | 325 | 147 | 720 | 113139 | 68734 | 186232 |
| 26 | Design 22 | 1464 | 1047 | 2047 | 295452 | 231453 | 377148 |
| 27 | Design 23 | 2887 | 1869 | 4460 | 460106 | 369594 | 572784 |
| 28 | Design 24 | 2466 | 1434 | 4242 | 650686 | 513751 | 824120 |

### Example 5: RBD Knockout Screening

[0543] In vitro work was carried out test whether the ACE2 binding domain met the criteria for RBD knock out for the following RBD mutant constructs shown in Table 13.

TABLE 13

| SEQ | Plasmid | |
|---|---|---|
| ID NO: | ID | Plasmid Name |
| 68 | 225 | pRS5a-S-RBD-mpSS ACE2 binding mutation K417W |
| 67 | 226* | pRS5a-S-RBD-mpSS ACE2 binding mutation K417M |
| 66 | 229* | pRS5a-S-RBD-mpSS ACE2 binding mutation K417L |
| 90 | 230* | pRS5a-S-RBD-mpSS ACE2 binding mutation F486T |
| 84 | 231* | pRS5a-S-RBD-mpSS ACE2 binding mutation F486H |
| 88 | 232* | pRS5a-S-RBD-mpSS ACE2 binding mutation F486N |
| 87 | 233* | pRS5a-S-RBD-mpSS ACE2 binding mutation F486M |
| 85 | 234 | pRS5a-S-RBD-mpSS ACE2 binding mutation F486I |
| 89 | 235 | pRS5a-S-RBD-mpSS ACE2 binding mutation F486P |
| 91 | 237 | pRS5a-S-RBD-mpSS ACE2 binding mutation F486W |
| 72 | 239 | pRS5a-S-RBD-mpSS ACE2 binding mutation L455A |
| 76 | 241 | pRS5a-S-RBD-mpSS ACE2 binding mutation L455W |
| 75 | 242* | pRS5a-S-RBD-mpSS ACE2 binding mutation L455N |
| 74 | 243 | pRS5a-S-RBD-mpSS ACE2 binding mutation L455M |
| 78 | 244* | pRS5a-S-RBD-mpSS ACE2 binding mutation F456I |
| 80 | 245 | pRS5a-S-RBD-mpSS ACE2 binding mutation F456Y |
| 79 | 246* | pRS5a-S-RBD-mpSS ACE2 binding mutation F456W |
| 77 | 247* | pRS5a-S-RBD-mpSS ACE2 binding mutation F456H |
| 95 | 249 | pRS5a-S-RBD-mpSS ACE2 binding mutation N487M |
| 93 | 250 | pRS5a-S-RBD-mpSS ACE2 binding mutation N487F |
| 96 | 251* | pRS5a-S-RBD-mpSS ACE2 binding mutation N487Q |
| 83 | 252 | pRS5a-S-RBD-mpSS ACE2 binding mutation G476T |
| 81 | 253 | pRS5a-S-RBD-mpSS ACE2 binding mutation Y473W |
| 97 | 255 | pRS5a-S-RBD-mpSS ACE2 binding mutation Q493A |
| 98 | 256 | pRS5a-S-RBD-mpSS ACE2 binding mutation Q493Y |
| 99 | 257 | pRS5a-S-RBD-mpSS ACE2 binding mutation Q493F |
| 100 | 258 | pRS5a-S-RBD-mpSS ACE2 binding mutation Q493R |
| 101 | 259 | pRS5a-S-RBD-mpSS ACE2 binding mutation Q493M |
| 102 | 260 | pRS5a-S-RBD-mpSS ACE2 binding mutation Q493C |
| 103 | 261 | pRS5a-S-RBD-mpSS ACE2 binding mutation Q493G |
| 104 | 262 | pRS5a-S-RBD-mpSS ACE2 binding mutation Q493V |
| 71 | 264 | pRS5a-S-RBD-mpSS ACE2 binding mutation Y453A |
| 105 | 265 | pRS5a-S-RBD-mpSS ACE2 binding mutation glycan K417N A419T |
| — | 266 | pRS5a-S-RBD-mpSS ACE2 binding mutation glycan Y449A Y45 IT |
| — | 268 | pRS5a-S-RBD-mpSS ACE2 binding mutation glycan L455A R457T |
| 111 | 271 | pRS5a-S-RBD-mpSS ACE2 binding mutation glycan A475N S477T |
| 112 | 272 | pRS5a-S-RBD-mpSS ACE2 binding mutation glycan G476N |
| 113 | 273 | pRS5a-S-RBD-mpSS ACE2 binding mutation glycan Y489T |
| 114 | 274 | pRS5a-S-RBD-mpSS ACE2 binding mutation glycan Q493N Y495T |

[0544] The RBD knockout mutants were expressed according to the protocols described above and tested for ACE2 binding using BLI using the methodology as described above. RBD ACE2_Kocked out mutants constructs 226, 229, 230, 231, 232, 233, 242, 244, 246, 247 and 251 (* in Table 13) show relatively high expression levels, but have reduced binding against ACE2, indicating the importance of these residues to interactions with the ACE2 binding domain.

SUMMARY OF SEQUENCES
SEQ ID NO: 1-complete genome sequence of Severe Acute Respiratory Syndrome Coronavirus 2 (SARS-
CoV2) (Wu et al. 2020 Nature 579:265-269; GenBank Accession MN908947.3 entitled “Severe Acute
Respiratory Syndrome Coronavirus 2 isolate Wuhan-Hu-1″) having the features 5’-3’ as follows:
5’ UTR nucleotides 1-265
“orf1ab” gene nucleotides 266-21555 with CDS nucleotides (join) 266-13468, 13468-21555 producing
″orf1ab polyprotein” (replicase, protein_id and GenBank Accession QHD43415.1)
“S” gene nucleotides 21563-25384 with CDS nucleotides 21563-25384 (underlined) producing “surface
glycoprotein” (spike (S) protein, protein_id and GenBank Accession QHD43416.1)
“ORF3a” gene nucleotides 25393-26220 with CDS nucleotides 25393-26220 producing “ORF3a protein”
(protein_id and GenBank Accession QHD43417.1)
“E” gene nucleotides 26245-26472 with CDS nucleotides 26245-26472 producing “envelope protein”
(envelope (E) protein, protein id and GenBank Accession QHD43418.1)
“M” gene nucleotides 26523-27191 with CDS nucleotides 26523-27191 producing “membrane
glycoprotein” (membrane (M) protein, protein_id and GenBank Accession QHD43419.1)
“ORF6” gene nucleotides 27202-27387 with CDS nucleotides 27202-27387 producing “ORF6 protein”
(protein_id and GenBank Accession QHD43420.1)
“ORF7a” gene nucleotides 27394-27759 with CDS nucleotides 27394-27759 producing “ORF7a protein”
(protein_id and GenBank Accession QHD43421.1)
“ORF8” gene nucleotides 27894-28259 with CDS nucleotides 27894-28259 producing “ORF8 protein”
(protein id and GenBank Accession QHD43422.1)
“N” gene nucleotides 28274-29533 with CDS nucleotides 28274-29533 producing “nucleocapsid
phosphoprotein ” (nucleocapsid (N) protein, protein_id and GenBank Accession QHD43423.2)
“ORF10” gene nucleotides 29558-29674 with CDS nucleotides 29558-29674 producing “ORF10 protein”
(protein_id and GenBank Accession QHI42199.1)
3’ UTR nucleotides 29675-29903

| ATTAAAGGTT TATACCTTCC CAGGTAACAA ACCAACCAAC TTTCGATCTC TTGTAGATCT | | 60 |
|---|---|---|
| GTTCTCTAAA CGAACTTTAA AATCTGTGTG GCTGTCACTC GGCTGCATGC TTAGTGCACT | | 120 |
| CACGCAGTAT AATTAATAAC TAATTACTGT CGTTGACAGG ACACGAGTAA CTCGTCTATC | | 180 |
| TTCTGCAGGC TGCTTACGGT TTCGTCCGTG TTGCAGCCGA TCATCAGCAC ATCTAGGTTT | | 240 |
| CGTCCGGGTG TGACCGAAAG GTAAGATGGA GAGCCTTGTC CCTGGTTTCA ACGAGAAAAC | | 300 |
| ACACGTCCAA CTCAGTTTGC CTGTTTTACA GGTTCGCGAC GTGCTCGTAC GTGGCTTTGG | | 360 |
| AGACTCCGTG GAGGAGGTCT TATCAGAGGC ACGTCAACAT CTTAAAGATG GCACTTGTGG | | 420 |
| CTTAGTAGAA GTTGAAAAAG GCGTTTTGCC TCAACTTGAA CAGCCCTATG TGTTCATCAA | | 480 |
| ACGTTCGGAT GCTCGAACTG CACCTCATGG TCATGTTATG GTTGAGCTGG TAGCAGAACT | | 540 |
| CGAAGGCATT CAGTACGGTC GTAGTGGTGA GACACTTGGT GTCCTTGTCC CTCATGTGGG | | 600 |
| CGAAATACCA GTGGCTTACC GCAAGGTTCT TCTTCGTAAG AACGGTAATA AAGGAGCTGG | | 660 |
| TGGCCATAGT TACGGCGCCG ATCTAAAGTC ATTTGACTTA GGCGACGAGC TTGGCACTGA | | 720 |
| TCCTTATGAA GATTTTCAAG AAAACTGGAA CACTAAACAT AGCAGTGGTG TTACCCGTGA | | 780 |
| ACTCATGCGT GAGCTTAACG GAGGGGCATA CACTCGCTAT GTCGATAACA ACTTCTGTGG | | 840 |
| CCCTGATGGC TACCCTCTTG AGTGCATTAA AGACCTTCTA GCACGTGCTG GTAAAGCTTC | | 900 |
| ATGCACTTTG TCCGAACAAC TGGACTTTAT TGACACTAAG AGGGGTGTAT ACTGCTGCCG | | 960 |
| TGAACATGAG CATGAAATTG CTTGGTACAC GGAACGTTCT GAAAAGAGCT ATGAATTGCA | | 1020 |
| GACACCTTTT GAAATTAAAT TGGCAAAGAA ATTTGACACC TTCAATGGGG AATGTCCAAA | | 1080 |
| TTTTGTATTT CCCTTAAATT CCATAATCAA GACTATTCAA CCAAGGGTTG AAAAGAAAAA | | 1140 |
| GCTTGATGGC TTTATGGGTA GAATTCGATC TGTCTATCCA GTTGCGTCAC CAAATGAATG | | 1200 |
| CAACCAAATG TGCCTTTCAA CTCTCATGAA GTGTGATCAT TGTGGTGAAA CTTCATGGCA | | 1260 |
| GACGGGCGAT TTTGTTAAAG CCACTTGCGA ATTTTGTGGC ACTGAGAATT TGACTAAAGA | | 1320 |
| AGGTGCCACT ACTTGTGGTT ACTTACCCCA AAATGCTGTT GTTAAAATTT ATTGTCCAGC | | 1380 |
| ATGTCACAAT TCAGAAGTAG GACCTGAGCA TAGTCTTGCC GAATACCATA ATGAATCTGG | | 1440 |
| CTTGAAAACC ATTCTTCGTA AGGGTGGTCG CACTATTGCC TTTGGAGGCT GTGTGTTCTC | | 1500 |
| TTATGTTGGT TGCCATAACA AGTGTGCCTA TTGGGTTCCA CGTGCTAGCG CTAACATAGG | | 1560 |
| TTGTAACCAT ACAGGTGTTG TTGGAGAAGG TTCCGAAGGT CTTAATGACA ACCTTCTTGA | | 1620 |
| AATACTCCAA AAAGAGAAAG TCAACATCAA TATTGTTGGT GACTTTAAAC TTAATGAAGA | | 1680 |
| GATCGCCATT ATTTTGGCAT CTTTTTCTGC TTCCACAAGT GCTTTTGTGG AAACTGTGAA | | 1740 |
| AGGTTTGGAT TATAAAGCAT TCAAACAAAT TGTTGAATCC TGTGGTAATT TTAAAGTTAC | | 1800 |
| AAAAGGAAAA GCTAAAAAAG GTGCCTGGAA TATTGGTGAA CAGAAATCAA TACTGAGTCC | | 1860 |
| TCTTTATGCA TTTGCATCAG AGGCTGCTCG TGTTGTACGA TCAATTTTCT CCCGCACTCT | | 1920 |
| TGAAACTGCT CAAAATTCTG TGCGTGTTTT ACAGAAGGCC GCTATAACAA TACTAGATGG | | 1980 |
| AATTTCACAG TATTCACTGA GACTCATTGA TGCTATGATG TTCACATCTG ATTTGGCTAC | | 2040 |
| TAACAATCTA GTTGTAATGG CCTACATTAC AGGTGGTGTT GTTCAGTTGA CTTCGCAGTG | | 2100 |
| GCTAACTAAC ATCTTTGGCA CTGTTTATGA AAAACTCAAA CCCGTCCTTG ATTGGCTTGA | | 2160 |
| AGAGAAGTTT AAGGAAGGTG TAGAGTTTCT TAGAGACGGT TGGGAAATTG TTAAATTTAT | | 2220 |
| CTCAACCTGT GCTTGTGAAA TTGTCGGTGG ACAAATTGTC ACCTGTGCAA AGGAAATTAA | | 2280 |
| GGAGAGTGTT CAGACATTCT TTAAGCTTGT AAATAAATTT TTGGCTTTGT GTGCTGACTC | | 2340 |
| TATCATTATT GGTGGAGCTA AACTTAAAGC CTTGAATTTA GGTGAAACAT TTGTCACGCA | | 2400 |
| CTCAAAGGGA TTGTACAGAA AGTGTGTTAA ATCCAGAGAA GAAACTGGCC TACTCATGCC | | 2460 |
| TCTAAAAGCC CCAAAAGAAA TTATCTTCTT AGAGGGAGAA ACACTTCCCA CAGAAGTGTT | | 2520 |
| AACAGAGGAA GTTGTCTTGA AAACTGGTGA TTTACAACCA TTAGAACAAC CTACTAGTGA | | 2580 |
| AGCTGTTGAA GCTCCATTGG TTGGTACACC AGTTTGTATT AACGGGCTTA TGTTGCTCGA | | 2640 |
| AATCAAAGAC ACAGAAAAGT ACTGTGCCCT TGCACCTAAT ATGATGGTAA CAAACAATAC | | 2700 |
| CTTCACACTC AAAGGCGGTG CACCAACAAA GGTTACTTTT GGTGATGACA CTGTGATAGA | | 2760 |
| AGTGCAAGGT TACAAGAGTG TGAATATCAC TTTTGAACTT GATGAAAGGA TTGATAAAGT | | 2820 |
| ACTTAATGAG AAGTGCTCTG CCTATACAGT TGAACTCGGT ACAGAAGTAA ATGAGTTCGC | | 2880 |
| CTGTGTTGTG GCAGATGCTG TCATAAAAAC TTTGCAACCA GTATCTGAAT TACTTACACC | | 2940 |
| ACTGGGCATT GATTTAGATG AGTGGAGTAT GGCTACATAC TACTTATTTG ATGAGTCTGG | | 3000 |
| TGAGTTTAAA TTGGCTTCAC ATATGTATTG TTCTTTCTAC CCTCCAGATG AGGATGAAGA | | 3060 |
| AGAAGGTGAT TGTGAAGAAG AAGAGTTTGA GCCATCAACT CAATATGAGT ATGGTACTGA | | 3120 |
| AGATGATTAC CAAGGTAAAC CTTTGGAATT TGGTGCCACT TCTGCTGCTC TTCAACCTGA | | 3180 |
| AGAAGAGCAA GAAGAAGATT GGTTAGATGA TGATAGTCAA CAAACTGTTG GTCAACAAGA | | 3240 |
| CGGCAGTGAG GACAATCAGA CAACTACTAT TCAAACAATT GTTGAGGTTC AACCTCAATT | | 3300 |
| AGAGATGGAA CTTACACCAG TTGTTCAGAC TATTGAAGTG AATAGTTTTA GTGGTTATTT | | 3360 |
| AAAACTTACT GACAATGTAT ACATTAAAAA TGCAGACATT GTGGAAGAAG CTAAAAAGGT | | 3420 |
| AAAACCAACA GTGGTTGTTA ATGCAGCCAA TGTTTACCTT AAACATGGAG GAGGTGTTGC | | 3480 |
| AGGAGCCTTA AATAAGGCTA CTAACAATGC CATGCAAGTT GAATCTGATG ATTACATAGC | | 3540 |
| TACTAATGGA CCACTTAAAG TGGGTGGTAG TTGTGTTTTA AGCGGACACA ATCTTGCTAA | | 3600 |
| ACACTGTCTT CATGTTGTCG GCCCAAATGT TAACAAAGGT GAAGACATTC AACTTCTTAA | | 3660 |
| GAGTGCTTAT GAAAATTTTA ATCAGCACGA AGTTCTACTT GCACCATTAT TATCAGCTGG | | 3720 |
| TATTTTTGGT GCTGACCCTA TACATTCTTT AAGAGTTTGT GTAGATACTG TTCGCACAAA | | 3780 |
| TGTCTACTTA GCTGTCTTTG ATAAAAATCT CTATGACAAA CTTGTTTCAA GCTTTTTGGA | | 3840 |
| AATGAAGAGT GAAAAGCAAG TTGAACAAAA GATCGCTGAG ATTCCTAAAG AGGAAGTTAA | | 3900 |
| GCCATTTATA ACTGAAAGTA AACCTTCAGT TGAACAGAGA AAACAAGATG ATAAGAAAAT | | 3960 |
| CAAAGCTTGT GTTGAAGAAG TTACAACAAC TCTGGAAGAA ACTAAGTTCC TCACAGAAAA | | 4020 |
| CTTGTTACTT TATATTGACA TTAATGGCAA TCTTCATCCA GATTCTGCCA CTCTTGTTAG | | 4080 |
| TGACATTGAC ATCACTTTCT TAAAGAAAGA TGCTCCATAT ATAGTGGGTG ATGTTGTTCA | | 4140 |
| AGAGGGTGTT TTAACTGCTG TGGTTATACC TACTAAAAAG GCTGGTGGCA CTACTGAAAT | | 4200 |
| GCTAGCGAAA GCTTTGAGAA AAGTGCCAAC AGACAATTAT ATAACCACTT ACCCGGGTCA | | 4260 |
| GGGTTTAAAT GGTTACACTG TAGAGGAGGC AAAGACAGTG CTTAAAAAGT GTAAAAGTGC | | 4320 |
| CTTTTACATT CTACCATCTA TTATCTCTAA TGAGAAGCAA GAAATTCTTG GAACTGTTTC | | 4380 |
| TTGGAATTTG CGAGAAATGC TTGCACATGC AGAAGAAACA CGCAAATTAA TGCCTGTCTG | | 4440 |
| TGTGGAAACT AAAGCCATAG TTTCAACTAT ACAGCGTAAA TATAAGGGTA TTAAAATACA | | 4500 |
| AGAGGGTGTG GTTGATTATG GTGCTAGATT TTACTTTTAG ACCAGTAAAA CAACTGTAGC | | 4560 |
| GTCACTTATC AACACACTTA ACGATCTAAA TGAAACTCTT GTTACAATGC CACTTGGCTA | | 4620 |
| TGTAACACAT GGCTTAAATT TGGAAGAAGC TGCTCGGTAT ATGAGATCTC TCAAAGTGCC | | 4680 |
| AGCTACAGTT TCTGTTTCTT CACCTGATGC TGTTACAGCG TATAATGGTT ATCTTACTTC | | 4740 |
| TTCTTCTAAA ACACCTGAAG AACATTTTAT TGAAACCATC TCACTTGCTG GTTCCTATAA | | 4800 |
| AGATTGGTCC TATTCTGGAC AATCTACACA ACTAGGTATA GAATTTCTTA AGAGAGGTGA | | 4860 |
| TAAAAGTGTA TATTACACTA GTAATCCTAC CACATTCCAC CTAGATGGTG AAGTTATCAC | | 4920 |
| CTTTGACAAT CTTAAGACAC TTCTTTCTTT GAGAGAAGTG AGGACTATTA AGGTGTTTAC | | 4980 |
| AACAGTAGAC AACATTAACC TCCACACGCA AGTTGTGGAC ATGTCAATGA CATATGGACA | | 5040 |
| ACAGTTTGGT CCAACTTATT TGGATGGAGC TGATGTTACT AAAATAAAAC CTCATAATTC | | 5100 |
| ACATGAAGGT AAAACATTTT ATGTTTTACC TAATGATGAC ACTCTACGTG TTGAGGCTTT | | 5160 |
| TGAGTACTAC CACACAACTG ATCCTAGTTT TCTGGGTAGG TACATGTCAG CATTAAATCA | | 5220 |
| CACTAAAAAG TGGAAATACC CACAAGTTAA TGGTTTAACT TCTATTAAAT GGGCAGATAA | | 5280 |
| CAACTGTTAT CTTGCCACTG CATTGTTAAC ACTCCAACAA ATAGAGTTGA AGTTTAATCC | | 5340 |
| ACCTGCTCTA CAAGATGCTT ATTACAGAGC AAGGGCTGGT GAAGCTGCTA ACTTTTGTGC | | 5400 |
| ACTTATCTTA GCCTACTGTA ATAAGACAGT AGGTGAGTTA GGTGATGTTA GAGAAACAAT | | 5460 |
| GAGTTACTTG TTTCAACATG CCAATTTAGA TTCTTGCAAA AGAGTCTTGA ACGTGGTGTG | | 5520 |
| TAAAACTTGT | GGACAACAGC AGACAACCCT TAAGGGTGTA GAAGCTGTTA TGTACATGGG | 5580 |

| | |
|---|---|
| CACACTTTCT TATGAACAAT TTAAGAAAGG TGTTCAGATA CCTTGTACGT GTGGTAAACA | 5640 |
| AGCTACAAAA TATCTAGTAC AACAGGAGTC ACCTTTTGTT ATGATGTCAG CACCACCTGC | 5700 |
| TCAGTATGAA CTTAAGCATG GTACATTTAC TTGTGCTAGT GAGTACACTG GTAATTACCA | 5760 |
| GTGTGGTCAC TATAAACATA TAACTTCTAA AGAAACTTTG TATTGCATAG ACGGTGCTTT | 5820 |
| ACTTACAAAG TCCTCAGAAT ACAAAGGTCC TATTACGGAT GTTTTCTACA AAGAAAACAG | 5880 |
| TTACACAACA ACCATAAAAC CAGTTACTTA TAAATTGGAT GGTGTTGTTT GTACAGAAAT | 5940 |
| TGACCCTAAG TTGGACAATT ATTATAAGAA AGACAATTCT TATTTCACAG AGCAACCAAT | 6000 |
| TGATCTTGTA CCAAACCAAC CATATCCAAA CGCAAGCTTC GATAATTTTA AGTTTGTATG | 6060 |
| TGATAATATC AAATTTGCTG ATGATTTAAA CCAGTTAACT GGTTATAAGA AACCTGCTTC | 6120 |
| AAGAGAGCTT AAAGTTACAT TTTTCCCTGA CTTAAATGGT GATGTGGTGG CTATTGATTA | 6180 |
| TAAACACTAC ACACCCTCTT TTAAGAAAGG AGCTAAATTG TTACATAAAC CTATTGTTTG | 6240 |
| GCATGTTAAC AATGCAACTA ATAAAGCCAC GTATAAACCA AATACCTGGT GTATACGTTG | 6300 |
| TCTTTGGAGC ACAAAACCAG TTGAAACATC AAATTCGTTT GATGTACTGA AGTCAGAGGA | 6360 |
| CGCGCAGGGA ATGGATAATC TTGCCTGCGA AGATCTAAAA CCAGTCTCTG AAGAAGTAGT | 6420 |
| GGAAAATCCT ACCATACAGA AAGACGTTCT TGAGTGTAAT GTGAAAACTA CCGAAGTTGT | 6480 |
| AGGAGACATT ATACTTAAAC CAGCAAATAA TAGTTTAAAA ATTACAGAAG AGGTTGGCCA | 6540 |
| CACAGATCTA ATGGCTGCTT ATGTAGACAA TTCTAGTCTT ACTATTAAGA AACCTAATGA | 6600 |
| ATTATCTAGA GTATTAGGTT TGAAAACCCT TGCTACTCAT GGTTTAGCTG CTGTTAATAG | 6660 |
| TGTCCCTTGG GATACTATAG CTAATTATGC TAAGCCTTTT CTTAACAAAG TTGTTAGTAC | 6720 |
| AACTACTAAC ATAGTTACAC GGTGTTTAAA CCGTGTTTGT ACTAATTATA TGCCTTATTT | 6780 |
| CTTTACTTTA TTGCTACAAT TGTGTACTTT TACTAGAAGT ACAAATTCTA GAATTAAAGC | 6840 |
| ATCTATGCCG ACTACTATAG CAAAGAATAC TGTTAAGAGT GTCGGTAAAT TTTGTCTAGA | 6900 |
| GGCTTCATTT AATTATTTGA AGTCACCTAA TTTTTCTAAA CTGATAAATA TTATAATTTG | 6960 |
| GTTTTTACTA TTAAGTGTTT GCCTAGGTTC TTTAATCTAC TCAACCGCTG CTTTAGGTGT | 7020 |
| TTTAATGTCT AATTTAGGCA TGCCTTCTTA CTGTACTGGT TACAGAGAAG GCTATTTGAA | 7080 |
| CTCTACTAAT GTCACTATTG CAACCTACTG TACTGGTTCT ATACCTTGTA GTGTTTGTCT | 7140 |
| TAGTGGTTTA GATTCTTTAG ACACCTATCC TTCTTTAGAA ACTATACAAA TTACCATTTC | 7200 |
| ATCTTTTAAA TGGGATTTAA CTGCTTTTGG CTTAGTTGCA GAGTGGTTTT TGGCATATAT | 7260 |
| TCTTTTCACT AGGTTTTTCT ATGTACTTGG ATTGGCTGCA ATCATGCAAT TGTTTTTCAG | 7320 |
| ctAttttgcA GTACATTTTA TTAGTAATTC TTGGCTTATG TGGTTAATAA TTAATCTTGT | 7380 |
| ACAAATGGCC CCGATTTCAG CTATGGTTAG AATGTACATC TTCTTTGCAT CATTTTATTA | 7440 |
| TGTATGGAAA AGTTATGTGC ATGTTGTAGA CGGTTGTAAT TCATCAACTT GTATGATGTG | 7500 |
| TTACAAACGT AATAGAGCAA CAAGAGTCGA ATGTACAACT ATTGTTAATG GTGTTAGAAG | 7560 |
| GTCCTTTTAT GTCTATGCTA ATGGAGGTAA AGGCTTTTGC AAACTACACA ATTGGAATTG | 7620 |
| TGTTAATTGT GATACATTCT GTGCTGGTAG TACATTTATT AGTGATGAAG TTGCGAGAGA | 7680 |
| CTTGTCACTA CAGTTTAAAA GACCAATAAA TCCTACTGAC CAGTCTTCTT ACATCGTTGA | 7740 |
| TAGTGTTACA GTGAAGAATG GTTCCATCCA TCTTTACTTT GATAAAGCTG GTCAAAAGAC | 7800 |
| TTATGAAAGA CATTCTCTCT CTCATTTTGT TAACTTAGAC AACCTGAGAG CTAATAACAC | 7860 |
| TAAAGGTTCA TTGCCTATTA ATGTTATAGT TTTTGATGGT AAATCAAAAT GTGAAGAATC | 7920 |
| ATCTGCAAAA TCAGCGTCTG TTTACTACAG TCAGCTTATG TGTCAACCTA TACTGTTACT | 7980 |
| AGATCAGGCA TTAGTGTCTG ATGTTGGTGA TAGTGCGGAA GTTGCAGTTA AAATGTTTGA | 8040 |
| TGCTTACGTT AATACGTTTT CATCAACTTT TAACGTACCA ATGGAAAAAC TCAAAACACT | 8100 |
| AGTTGCAACT GCAGAAGCTG AACTTGCAAA GAATGTGTCC TTAGACAATG TCTTATCTAC | 8160 |
| TTTTATTTCA GCAGCTCGGC AAGGGTTTGT TGATTCAGAT GTAGAAACTA AAGATGTTGT | 8220 |
| TGAATGTCTT AAATTGTCAC ATCAATCTGA CATAGAAGTT ACTGGCGATA GTTGTAATAA | 8280 |
| CTATATGCTC ACCTATAACA AAGTTGAAAA CATGACACCC CGTGACCTTG GTGCTTGTAT | 8340 |
| TGACTGTAGT GCGCGTCATA TTAATGCGCA GGTAGCAAAA AGTCACAACA TTGCTTTGAT | 8400 |
| ATGGAACGTT AAAGATTTCA TGTCATTGTC TGAACAACTA CGAAAACAAA TACGTAGTGC | 8460 |
| TGCTAAAAAG AATAACTTAC CTTTTAAGTT GACATGTGCA ACTACTAGAC AAGTTGTTAA | 8520 |
| TGTTGTAACA ACAAAGATAG CACTTAAGGG TGGTAAAATT GTTAATAATT GGTTGAAGCA | 8580 |
| GTTAATTAAA GTTACACTTG TGTTCCTTTT TGTTGCTGCT ATTTTCTATT TAATAACACC | 8640 |
| TGTTCATGTC ATGTCTAAAC ATACTGACTT TTCAAGTGAA ATCATAGGAT ACAAGGCTAT | 8700 |
| TGATGGTGGT GTCACTCGTG ACATAGCATC TACAGATACT TGTTTTGCTA ACAAACATGC | 8760 |
| TGATTTTGAC ACATGGTTTA GCCAGCGTGG TGGTAGTTAT ACTAATGACA AAGCTTGCCC | 8820 |
| ATTGATTGCT GCAGTCATAA CAAGAGAAGT GGGTTTTGTC GTGCCTGGTT TGCCTGGCAC | 8880 |
| GATATTACGC ACAACTAATG GTGACTTTTT GCATTTCTTA CCTAGAGTTT TTAGTGCAGT | 8940 |
| TGGTAACATC TGTTACACAC CATCAAAACT TATAGAGTAC ACTGACTTTG CAACATCAGC | 9000 |
| TTGTGTTTTG GCTGCTGAAT GTACAATTTT TAAAGATGCT TCTGGTAAGC CAGTACCATA | 9060 |
| TTGTTATGAT ACCAATGTAC TAGAAGGTTC TGTTGCTTAT GAAAGTTTAC GCCCTGACAC | 9120 |
| ACGTTATGTG CTCATGGATG GCTCTATTAT TCAATTTCCT AACACCTACC TTGAAGGTTC | 9180 |
| TGTTAGAGTG GTAACAACTT TTGATTCTGA GTACTGTAGG CACGGCACTT GTGAAAGATC | 9240 |
| AGAAGCTGGT GTTTGTGTAT CTACTAGTGG TAGATGGGTA CTTAACAATG ATTATTACAG | 9300 |
| ATCTTTACCA GGAGTTTTCT GTGGTGTAGA TGCTGTAAAT TTACTTACTA ATATGTTTAC | 9360 |
| ACCACTAATT CAACCTATTG GTGCTTTGGA CATATCAGCA TCTATAGTAG CTGGTGGTAT | 9420 |
| TGTAGCTATC GTAGTAACAT GCCTTGCCTA CTATTTTATG AGGTTTAGAA GAGCTTTTGG | 9480 |
| TGAATACAGT CATGTAGTTG CCTTTAATAC TTTACTATTC CTTATGTCAT TCACTGTACT | 9540 |
| CTGTTTAACA CCAGTTTACT CATTCTTACC TGGTGTTTAT TCTGTTATTT ACTTGTACTT | 9600 |
| GACATTTTAT CTTACTAATG ATGTTTCTTT TTTAGCACAT ATTCAGTGGA TGGTTATGTT | 9660 |
| CACACCTTTA GTACCTTTCT GGATAACAAT TGCTTATATC ATTTGTATTT CCACAAAGCA | 9720 |
| TTTCTATTGG TTCTTTAGTA ATTACCTAAA GAGACGTGTA GTCTTTAATG GTGTTTCCTT | 9780 |
| TAGTACTTTT GAAGAAGCTG CGCTGTGCAC CTTTTTGTTA AATAAAGAAA TGTATCTAAA | 9840 |
| GTTGCGTAGT GATGTGCTAT TACCTCTTAC GCAATATAAT AGATACTTAG CTCTTTATAA | 9900 |
| TAAGTACAAG TATTTTAGTG GAGCAATGGA TACAACTAGC TACAGAGAAG CTGCTTGTTG | 9960 |
| TCATCTCGCA AAGGCTCTCA ATGACTTCAG TAACTCAGGT TCTGATGTTC TTTACCAACC | 10020 |
| ACCACAAACC TCTATCACCT CAGCTGTTTT GCAGAGTGGT TTTAGAAAAA TGGCATTCCC | 10080 |
| ATCTGGTAAA GTTGAGGGTT GTATGGTACA AGTAACTTGT GGTACAACTA CACTTAACGG | 10140 |
| TCTTTGGCTT GATGACGTAG TTTACTGTCC AAGACATGTG ATCTGCACCT CTGAAGACAT | 10200 |
| GCTTAACCCT AATTATGAAG ATTTACTCAT TCGTAAGTCT AATCATAATT TCTTGGTACA | 10260 |
| GGCTGGTAAT GTTCAACTCA GGGTTATTGG ACATTCTATG CAAAATTGTG TACTTAAGCT | 10320 |
| TAAGGTTGAT ACAGCCAATC CTAAGACACC TAAGTATAAG TTTGTTCGCA TTCAACCAGG | 10380 |
| ACAGACTTTT TCAGTGTTAG CTTGTTACAA TGGTTCACCA TCTGGTGTTT ACCAATGTGC | 10440 |
| TATGAGGCCC AATTTCACTA TTAAGGGTTC ATTCCTTAAT GGTTCATGTG GTAGTGTTGG | 10500 |
| TTTTAACATA GATTATGACT GTGTCTCTTT TTGTTACATG CACCATATGG AATTACCAAC | 10560 |
| TGGAGTTCAT GCTGGCACAG ACTTAGAAGG TAACTTTTAT GGACCTTTTG TTGACAGGCA | 10620 |
| AACAGCACAA GCAGCTGGTA CGGACACAAC TATTACAGTT AATGTTTTAG CTTGGTTGTA | 10680 |
| CGCTGCTGTT ATAAATGGAG ACAGGTGGTT TCTCAATCGA TTTACCACAA CTCTTAATGA | 10740 |
| CTTTAACCTT GTGGCTATGA AGTACAATTA TGAACCTCTA ACACAAGACC ATGTTGACAT | 10800 |
| ACTAGGACCT CTTTCTGCTC AAACTGGAAT TGCCGTTTTA GATATGTGTG CTTCATTAAA | 10860 |
| AGAATTACTG CAAAATGGTA TGAATGGACG TAGCATATTG GGTAGTGCTT TATTAGAAGA | 10920 |
| TGAATTTACA CCTTTTGATG TTGTTAGACA ATGCTCAGGT GTTACTTTCC AAAGTGCAGT | 10980 |
| GAAAAGAACA ATCAAGGGTA CACACCACTG GTTGTTACTC ACAATTTTGA CTTCACTTTT | 11040 |
| AGTTTTAGTC CAGAGTACTC AATGGTCTTT GTTCTTTTTT TTGTATGAAA ATGCCTTTTT | 11100 |
| ACCTTTTGCT ATGGGTATTA TTGCTATGTC TGCTTTTGCA ATGATGTTTG TCAAACATAA | 11160 |
| GCATGCATTT CTCTGTTTGT TTTTGTTACC TTCTCTTGCC ACTGTAGCTT ATTTTAATAT | 11220 |
| GGTCTATATG CCTGCTAGTT GGGTGATGCG TATTATGACA TGGTTGGATA TGGTTGATAC | 11280 |
| TAGTTTGTCT GGTTTTAAGC TAAAAGACTG TGTTATGTAT GCATCAGCTG TAGTGTTACT | 11340 |
| AATCCTTATG ACAGCAAGAA CTGTGTATGA TGATGGTGCT AGGAGAGTGT GGACACTTAT | 11400 |
| GAATGTCTTG ACACTCGTTT ATAAAGTTTA TTATGGTAAT GCTTTAGATC AAGCCATTTC | 11460 |
| CATGTGGGCT CTTATAATCT CTGTTACTTC TAACTACTCA GGTGTAGTTA CAACTGTCAT | 11520 |
| GTTTTTGGGG AGAGGTATTG TTTTTATGTG TGTTGAGTAT TGCCCTATTT TCTTCATAAC | 11580 |
| TGGTAATACA CTTCAGTGTA TAATGCTAGT TTATTGTTTC TTAGGCTATT TTTGTACTTG | 11640 |
| TTACTTTGGC CTCTTTTGTT TACTCAACCG CTACTTTAGA CTGACTCTTG GTGTTTATGA | 11700 |
| TTACTTAGTT TCTACACAGG AGTTTAGATA TATGAATTCA CAGGGACTAC TCCCACCCAA | 11760 |
| GAATAGCATA GATGCCTTCA AACTCAACAT TAAATTGTTG GGTGTTGGTG GCAAACCTTG | 11820 |
| TATCAAAGTA GCCACTGTAC AGTCTAAAAT GTCAGATGTA AAGTGCACAT CAGTAGTCTT | 11880 |
| ACTCTCAGTT TTGCAACAAC TCAGAGTAGA ATCATCATCT AAATTGTGGG CTCAATGTGT | 11940 |
| CCAGTTACAC AATGACATTC TCTTAGCTAA AGATACTACT GAAGCCTTTG AAAAAATGGT | 12000 |
| TTCACTACTT TCTGTTTTGC TTTCCATGCA GGGTGCTGTA GACATAAACA AGCTTTGTGA | 12060 |
| AGAAATGCTG GACAACAGGG CAACCTTACA AGCTATAGCC TCAGAGTTTA GTTCCCTTCC | 12120 |
| ATCATATGCA GCTTTTGCTA CTGCTCAAGA AGCTTATGAG CAGGCTGTTG CTAATGGTGA | 12180 |
| TTCTGAAGTT GTTCTTAAAA AGTTGAAGAA GTCTTTGAAT GTGGCTAAAT CTGAATTTGA | 12240 |
| CCGTGATGCA GCCATGCAAC GTAAGTTGGA AAAGATGGCT GATCAAGCTA TGACCCAAAT | 12300 |
| GTATAAACAG GCTAGATCTG AGGACAAGAG GGCAAAAGTT ACTAGTGCTA TGCAGACAAT | 12360 |
| GCTTTTCACT ATGCTTAGAA AGTTGGATAA TGATGCACTC AACAACATTA TCAACAATGC | 12420 |
| AAGAGATGGT TGTGTTCCCT TGAACATAAT ACCTCTTACA ACAGCAGCCA AACTAATGGT | 12480 |
| TGTCATACCA GACTATAACA CATATAAAAA TACGTGTGAT GGTACAACAT TTACTTATGC | 12540 |
| ATCAGCATTG TGGGAAATCC AACAGGTTGT AGATGCAGAT AGTAAAATTG TTCAACTTAG | 12600 |
| TGAAATTAGT ATGGACAATT CACCTAATTT AGCATGGCCT CTTATTGTAA CAGCTTTAAG | 12660 |
| GGCCAATTCT GCTGTCAAAT TACAGAATAA TGAGCTTAGT CCTGTTGCAC TACGACAGAT | 12720 |
| GTCTTGTGCT GCCGGTACTA CACAAACTGC TTGCACTGAT GACAATGCGT TAGCTTACTA | 12780 |
| CAACACAACA AAGGGAGGTA GGTTTGTACT TGCACTGTTA TCCGATTTAC AGGATTTGAA | 12840 |
| ATGGGCTAGA TTCCCTAAGA GTGATGGAAC TGGTACTATC TATACAGAAC TGGAACCACC | 12900 |
| TTGTAGGTTT GTTACAGACA CACCTAAAGG TCCTAAAGTG AAGTATTTAT ACTTTATTAA | 12960 |
| AGGATTAAAC AACCTAAATA GAGGTATGGT ACTTGGTAGT TTAGCTGCCA CAGTACGTCT | 13020 |
| ACAAGCTGGT AATGCAACAG AAGTGCCTGC CAATTCAACT GTATTATCTT TCTGTGCTTT | 13080 |
| TGCTGTAGAT GCTGCTAAAG CTTACAAAGA TTATCTAGCT AGTGGGGGAC AACCAATCAC | 13140 |
| TAATTGTGTT AAGATGTTGT GTACACACAC TGGTACTGGT CAGGCAATAA CAGTTACACC | 13200 |
| GGAAGCCAAT ATGGATCAAG AATCCTTTGG TGGTGCATCG TGTTGTCTGT ACTGCCGTTG | 13260 |
| CCACATAGAT CATCCAAATC CTAAAGGATT TTGTGACTTA AAAGGTAAGT ATGTACAAAT | 13320 |
| ACCTACAACT TGTGCTAATG ACCCTGTGGG TTTTACACTT AAAAACACAG TCTGTACCGT | 13380 |
| CTGCGGTATG TGGAAAGGTT ATGGCTGTAG TTGTGATCAA CTCCGCGAAC CCATGCTTCA | 13440 |
| GTCAGCTGAT GCACAATCGT TTTTAAACGG GTTTGCGGTG TAAGTGCAGC CCGTCTTACA | 13500 |
| CCGTGCGGCA CAGGCACTAG TACTGATGTC GTATACAGGG CTTTTGACAT CTACAATGAT | 13560 |
| AAAGTAGCTG GTTTTGCTAA ATTCCTAAAA ACTAATTGTT GTCGCTTCCA AGAAAAGGAC | 13620 |
| GAAGATGACA ATTTAATTGA TTCTTACTTT GTAGTTAAGA GACACACTTT CTCTAACTAC | 13680 |
| CAACATGAAG AAACAATTTA TAATTTACTT AAGGATTGTC CAGCTGTTGC TAAACATGAC | 13740 |
| TTCTTTAAGT TTAGAATAGA CGGTGACATG GTACCACATA TATCACGTCA ACGTCTTACT | 13800 |
| AAATACACAA TGGCAGACCT CGTCTATGCT TTAAGGCATT TTGATGAAGG TAATTGTGAC | 13860 |
| ACATTAAAAG AAATACTTGT CACATACAAT TGTTGTGATG ATGATTATTT CAATAAAAAG | 13920 |
| GACTGGTATG ATTTTGTAGA AAACCCAGAT ATATTACGCG TATACGCCAA CTTAGGTGAA | 13980 |
| CGTGTACGCC AAGCTTTGTT AAAAACAGTA CAATTCTGTG ATGCCATGCG AAATGCTGGT | 14040 |
| ATTGTTGGTG TACTGACATT AGATAATCAA GATCTCAATG GTAACTGGTA TGATTTCGGT | 14100 |
| GATTTCATAC AAACCACGCC AGGTAGTGGA GTTCCTGTTG TAGATTCTTA TTATTCATTG | 14160 |
| TTAATGCCTA TATTAACCTT GACCAGGGCT TTAACTGCAG AGTCACATGT TGACACTGAC | 14220 |
| TTAACAAAGC CTTACATTAA GTGGGATTTG TTAAAATATG ACTTCACGGA AGAGAGGTTA | 14280 |
| AAACTCTTTG ACCGTTATTT TAAATATTGG GATCAGACAT ACCACCCAAA TTGTGTTAAC | 14340 |
| TGTTTGGATG ACAGATGCAT TCTGCATTGT GCAAACTTTA ATGTTTTATT CTCTACAGTG | 14400 |
| TTCCCACCTA CAAGTTTTGG ACCACTAGTG AGAAAAATAT TTGTTGATGG TGTTCCATTT | 14460 |
| GTAGTTTCAA CTGGATACCA CTTCAGAGAG CTAGGTGTTG TACATAATCA GGATGTAAAC | 14520 |
| TTACATAGCT CTAGACTTAG TTTTAAGGAA TTACTTGTGT ATGCTGCTGA CCCTGCTATG | 14580 |
| CACGCTGCTT CTGGTAATCT ATTACTAGAT AAACGCACTA CGTGCTTTTC AGTAGCTGCA | 14640 |
| CTTACTAACA ATGTTGCTTT TCAAACTGTC AAACCCGGTA ATTTTAACAA AGACTTCTAT | 14700 |
| GACTTTGCTG TGTCTAAGGG TTTCTTTAAG GAAGGAAGTT CTGTTGAATT AAAACACTTC | 14760 |
| TTCTTTGCTC AGGATGGTAA TGCTGCTATC AGCGATTATG ACTACTATCG TTATAATCTA | 14820 |
| CCAACAATGT GTGATATGAG ACAACTACTA TTTGTAGTTG AAGTTGTTGA TAAGTACTTT | 14880 |
| GATTGTTACG ATGGTGGCTG TATTAATGCT AACCAAGTCA TCGTCAACAA CCTAGACAAA | 14940 |
| TCAGCTGGTT TTCCATTTAA TAAATGGGGT AAGGCTAGAC TTTATTATGA TTCAATGAGT | 15000 |
| TATGAGGATC AAGATGCACT TTTCGCATAT ACAAAACGTA ATGTCATCCC TACTATAACT | 15060 |
| CAAATGAATC TTAAGTATGC CATTAGTGCA AAGAATAGAG CTCGCACCGT AGCTGGTGTC | 15120 |
| TCTATCTGTA GTACTATGAC CAATAGACAG TTTCATCAAA AATTATTGAA ATCAATAGCC | 15180 |
| GCCACTAGAG GAGCTACTGT AGTAATTGGA ACAAGCAAAT TCTATGGTGG TTGGCACAAC | 15240 |
| ATGTTAAAAA CTGTTTATAG TGATGTAGAA AACCCTCACC TTATGGGTTG GGATTATCCT | 15300 |
| AAATGTGATA GAGCCATGCC TAACATGCTT AGAATTATGG CCTCACTTGT TCTTGCTCGC | 15360 |
| AAACATACAA CGTGTTGTAG CTTGTCACAC CGTTTCTATA GATTAGCTAA TGAGTGTGCT | 15420 |
| CAAGTATTGA GTGAAATGGT CATGTGTGGC GGTTCACTAT ATGTTAAACC AGGTGGAACC | 15480 |
| TCATCAGGAG ATGCCACAAC TGCTTATGCT AATAGTGTTT TTAACATTTG TCAAGCTGTC | 15540 |
| ACGGCCAATG TTAATGCACT TTTATCTACT GATGGTAACA AAATTGCCGA TAAGTATGTC | 15600 |
| CGCAATTTAC AACACAGACT TTATGAGTGT CTCTATAGAA ATAGAGATGT TGACACAGAC | 15660 |
| TTTGTGAATG AGTTTTACGC ATATTTGCGT AAACATTTCT CAATGATGAT ACTCTCTGAC | 15720 |
| GATGCTGTTG TGTGTTTCAA TAGCACTTAT GCATCTCAAG GTCTAGTGGC TAGCATAAAG | 15780 |
| AACTTTAAGT CAGTTCTTTA TTATCAAAAC AATGTTTTTA TGTCTGAAGC AAAATGTTGG | 15840 |
| ACTGAGACTG ACCTTACTAA AGGACCTCAT GAATTTTGCT CTCAACATAC AATGCTAGTT | 15900 |
| AAACAGGGTG ATGATTATGT GTACCTTCCT TACCCAGATC CATCAAGAAT CCTAGGGGCC | 15960 |
| GGCTGTTTTG TAGATGATAT CGTAAAAACA GATGGTACAC TTATGATTGA ACGGTTCGTG | 16020 |
| TCTTTAGCTA TAGATGCTTA CCCACTTACT AAACATCCTA ATCAGGAGTA TGCTGATGTC | 16080 |
| TTTCATTTGT ACTTACAATA CATAAGAAAG CTACATGATG AGTTAACAGG ACACATGTTA | 16140 |
| GACATGTATT CTGTTATGCT TACTAATGAT AACACTTCAA GGTATTGGGA ACCTGAGTTT | 16200 |
| TATGAGGCTA TGTACACACC GCATACAGTC TTACAGGCTG TTGGGGCTTG TGTTCTTTGC | 16260 |
| AATTCACAGA CTTCATTAAG ATGTGGTGCT TGCATACGTA GACCATTCTT ATGTTGTAAA | 16320 |
| TGCTGTTACG ACCATGTCAT ATCAACATCA CATAAATTAG TGTTGTCTGT TAATCCGTAT | 16380 |
| GTTTGCAATG CTCCAGGTTG TGATGTCACA GATGTGACTC AACTTTACTT AGGAGGTATG | 16440 |
| AGCTATTATT GTAAATCACA TAAACCACCC ATTAGTTTTC CATTGTGTGC TAATGGACAA | 16500 |
| GTTTTTGGTT TATATAAAAA TACATGTGTT GGTAGCGATA ATGTTACTGA CTTTAATGCA | 16560 |
| ATTGCAACAT GTGACTGGAC AAATGCTGGT GATTACATTT TAGCTAACAC CTGTACTGAA | 16620 |
| AGACTCAAGC TTTTTGCAGC AGAAACGCTC AAAGCTACTG AGGAGACATT TAAACTGTCT | 16680 |
| TATGGTATTG CTACTGTACG TGAAGTGCTG TCTGACAGAG AATTACATCT TTCATGGGAA | 16740 |
| GTTGGTAAAC CTAGACCACC ACTTAACCGA AATTATGTCT TTACTGGTTA TCGTGTAACT | 16800 |
| AAAAACAGTA AAGTACAAAT AGGAGAGTAC ACCTTTGAAA AAGGTGACTA TGGTGATGCT | 16860 |
| GTTGTTTACC GAGGTACAAC AACTTACAAA TTAAATGTTG GTGATTATTT TGTGCTGACA | 16920 |
| TCACATACAG TAATGCCATT AAGTGCACCT ACACTAGTGC CACAAGAGCA CTATGTTAGA | 16980 |
| ATTACTGGCT TATACCCAAC ACTCAATATC TCAGATGAGT TTTCTAGCAA TGTTGCAAAT | 17040 |
| TATCAAAAGG TTGGTATGCA AAAGTATTCT ACACTCCAGG GACCACCTGG TACTGGTAAG | 17100 |
| AGTCATTTTG CTATTGGCCT AGCTCTCTAC TACCCTTCTG CTCGCATAGT GTATACAGCT | 17160 |
| TGCTCTCATG CCGCTGTTGA TGCACTATGT GAGAAGGCAT TAAAATATTT GCCTATAGAT | 17220 |
| AAATGTAGTA GAATTATACC TGCACGTGCT CGTGTAGAGT GTTTTGATAA ATTCAAAGTG | 17280 |
| AATTCAACAT TAGAACAGTA TGTCTTTTGT ACTGTAAATG CATTGCCTGA GACGACAGCA | 17340 |
| GATATAGTTG TCTTTGATGA AATTTCAATG GCCACAAATT ATGATTTGAG TGTTGTCAAT | 17400 |
| GCCAGATTAC GTGCTAAGCA CTATGTGTAC ATTGGCGACC CTGCTCAATT ACCTGCACCA | 17460 |
| CGCACATTGC TAACTAAGGG CACACTAGAA CCAGAATATT TCAATTCAGT GTGTAGACTT | 17520 |
| ATGAAAACTA TAGGTCCAGA CATGTTCCTC GGAACTTGTC GGCGTTGTCC TGCTGAAATT | 17580 |
| GTTGACACTG TGAGTGCTTT GGTTTATGAT AATAAGCTTA AAGCACATAA AGACAAATCA | 17640 |
| GCTCAATGCT TTAAAATGTT TTATAAGGGT GTTATCACGC ATGATGTTTC ATCTGCAATT | 17700 |
| AACAGGCCAC AAATAGGCGT GGTAAGAGAA TTCCTTACAC GTAACCCTGC TTGGAGAAAA | 17760 |
| GCTGTCTTTA TTTCACCTTA TAATTCACAG AATGCTGTAG CCTCAAAGAT TTTGGGACTA | 17820 |
| CCAACTCAAA CTGTTGATTC ATCACAGGGC TCAGAATATG ACTATGTCAT ATTCACTCAA | 17880 |
| ACCACTGAAA CAGCTCACTC TTGTAATGTA AACAGATTTA ATGTTGCTAT TACCAGAGCA | 17940 |
| AAAGTAGGCA TACTTTGCAT AATGTCTGAT AGAGACCTTT ATGACAAGTT GCAATTTACA | 18000 |
| AGTCTTGAAA TTCCACGTAG GAATGTGGCA ACTTTACAAG CTGAAAATGT AACAGGACTC | 18060 |
| TTTAAAGATT GTAGTAAGGT AATCACTGGG TTACATCCTA CACAGGCACC TACACACCTC | 18120 |
| AGTGTTGACA CTAAATTCAA AACTGAAGGT TTATGTGTTG ACATACCTGG CATACCTAAG | 18180 |
| GACATGACCT ATAGAAGACT CATCTCTATG ATGGGTTTTA AAATGAATTA TCAAGTTAAT | 18240 |
| GGTTACCCTA ACATGTTTAT CACCCGCGAA GAAGCTATAA GACATGTACG TGCATGGATT | 18300 |
| GGCTTCGATG TCGAGGGGTG TCATGCTACT AGAGAAGCTG TTGGTACCAA TTTACCTTTA | 18360 |
| CAGCTAGGTT TTTCTACAGG TGTTAACCTA GTTGCTGTAC CTACAGGTTA TGTTGATACA | 18420 |
| CCTAATAATA CAGATTTTTC CAGAGTTAGT GCTAAACCAC CGCCTGGAGA TCAATTTAAA | 18480 |
| CACCTCATAC CACTTATGTA CAAAGGACTT CCTTGGAATG TAGTGCGTAT AAAGATTGTA | 18540 |
| CAAATGTTAA GTGACACACT TAAAAATCTC TCTGACAGAG TCGTATTTGT CTTATGGGCA | 18600 |
| CATGGCTTTG AGTTGACATC TATGAAGTAT TTTGTGAAAA TAGGACCTGA GCGCACCTGT | 18660 |
| TGTCTATGTG ATAGACGTGC CACATGCTTT TCCACTGCTT CAGACACTTA TGCCTGTTGG | 18720 |
| CATCATTCTA TTGGATTTGA TTACGTCTAT AATCCGTTTA TGATTGATGT TCAACAATGG | 18780 |
| GGTTTTACAG GTAACCTACA AAGCAACCAT GATCTGTATT GTCAAGTCCA TGGTAATGCA | 18840 |
| CATGTAGCTA GTTGTGATGC AATCATGACT AGGTGTCTAG CTGTCCACGA GTGCTTTGTT | 18900 |
| AAGCGTGTTG ACTGGACTAT TGAATATCCT ATAATTGGTG ATGAACTGAA GATTAATGCG | 18960 |
| GCTTGTAGAA AGGTTCAACA CATGGTTGTT AAAGCTGCAT TATTAGCAGA CAAATTCCCA | 19020 |
| GTTCTTCACG ACATTGGTAA CCCTAAAGCT ATTAAGTGTG TACCTCAAGC TGATGTAGAA | 19080 |
| TGGAAGTTCT ATGATGCACA GCCTTGTAGT GACAAAGCTT ATAAAATAGA AGAATTATTC | 19140 |
| TATTCTTATG CCACACATTC TGACAAATTC ACAGATGGTG TATGCCTATT TTGGAATTGC | 19200 |
| AATGTCGATA GATATCCTGC TAATTCCATT GTTTGTAGAT TTGACACTAG AGTGCTATCT | 19260 |
| AACCTTAACT TGCCTGGTTG TGATGGTGGC AGTTTGTATG TAAATAAACA TGCATTCCAC | 19320 |
| ACACCAGCTT TTGATAAAAG TGCTTTTGTT AATTTAAAAC AATTACCATT TTTCTATTAC | 19380 |
| TCTGACAGTC CATGTGAGTC TCATGGAAAA CAAGTAGTGT CAGATATAGA TTATGTACCA | 19440 |
| CTAAAGTCTG CTACGTGTAT AACACGTTGC AATTTAGGTG GTGCTGTCTG TAGACATCAT | 19500 |
| GCTAATGAGT ACAGATTGTA TCTCGATGCT TATAACATGA TGATCTCAGC TGGCTTTAGC | 19560 |
| TTGTGGGTTT ACAAACAATT TGATACTTAT AACCTCTGGA ACACTTTTAC AAGACTTCAG | 19620 |
| AGTTTAGAAA ATGTGGCTTT TAATGTTGTA AATAAGGGAC ACTTTGATGG ACAACAGGGT | 19680 |
| GAAGTACCAG TTTCTATCAT TAATAACACT GTTTACACAA AAGTTGATGG TGTTGATGTA | 19740 |
| GAATTGTTTG AAAATAAAAC AACATTACCT GTTAATGTAG CATTTGAGCT TTGGGCTAAG | 19800 |
| CGCAACATTA AACCAGTACC AGAGGTGAAA ATACTCAATA ATTTGGGTGT GGACATTGCT | 19860 |
| GCTAATACTG TGATCTGGGA CTACAAAAGA GATGCTCCAG CACATATATC TACTATTGGT | 19920 |
| GTTTGTTCTA TGACTGACAT AGCCAAGAAA CCAACTGAAA CGATTTGTGC ACCACTCACT | 19980 |
| GTCTTTTTTG ATGGTAGAGT TGATGGTCAA GTAGACTTAT TTAGAAATGC CCGTAATGGT | 20040 |
| GTTCTTATTA CAGAAGGTAG TGTTAAAGGT TTACAACCAT CTGTAGGTCC CAAACAAGCT | 20100 |
| AGTCTTAATG GAGTCACATT AATTGGAGAA GCCGTAAAAA CACAGTTCAA TTATTATAAG | 20160 |
| AAAGTTGATG GTGTTGTCCA ACAATTACCT GAAACTTACT TTACTCAGAG TAGAAATTTA | 20220 |
| CAAGAATTTA AACCCAGGAG TCAAATGGAA ATTGATTTCT TAGAATTAGC TATGGATGAA | 20280 |
| TTCATTGAAC GGTATAAATT AGAAGGCTAT GCCTTCGAAC ATATCGTTTA TGGAGATTTT | 20340 |
| AGTCATAGTC AGTTAGGTGG TTTACATCTA CTGATTGGAC TAGCTAAACG TTTTAAGGAA | 20400 |
| TCACCTTTTG AATTAGAAGA TTTTATTCCT ATGGACAGTA CAGTTAAAAA CTATTTCATA | 20460 |
| ACAGATGCGC AAACAGGTTC ATCTAAGTGT GTGTGTTCTG TTATTGATTT ATTACTTGAT | 20520 |
| GATTTTGTTG AAATAATAAA ATCCCAAGAT TTATCTGTAG TTTCTAAGGT TGTCAAAGTG | 20580 |
| ACTATTGACT ATACAGAAAT TTCATTTATG CTTTGGTGTA AAGATGGCCA TGTAGAAACA | 20640 |
| TTTTACCCAA AATTACAATC TAGTCAAGCG TGGCAACCGG GTGTTGCTAT GCCTAATCTT | 20700 |
| TACAAAATGC AAAGAATGCT ATTAGAAAAG TGTGACCTTC AAAATTATGG TGATAGTGCA | 20760 |
| ACATTACCTA AAGGCATAAT GATGAATGTC GCAAAATATA CTCAACTGTG TCAATATTTA | 20820 |
| AACACATTAA CATTAGCTGT ACCCTATAAT ATGAGAGTTA TACATTTTGG TGCTGGTTCT | 20880 |
| GATAAAGGAG TTGCACCAGG TACAGCTGTT TTAAGACAGT GGTTGCCTAC GGGTACGCTG | 20940 |
| CTTGTCGATT CAGATCTTAA TGACTTTGTC TCTGATGCAG ATTCAACTTT GATTGGTGAT | 21000 |
| TGTGCAACTG TACATACAGC TAATAAATGG GATCTCATTA TTAGTGATAT GTACGACCCT | 21060 |
| AAGACTAAAA ATGTTACAAA AGAAAATGAC TCTAAAGAGG GTTTTTTCAC TTACATTTGT | 21120 |
| GGGTTTATAC AACAAAAGCT AGCTCTTGGA GGTTCCGTGG CTATAAAGAT AACAGAACAT | 21180 |
| TCTTGGAATG CTGATCTTTA TAAGCTCATG GGACACTTCG CATGGTGGAC AGCCTTTGTT | 21240 |
| ACTAATGTGA ATGCGTCATC ATCTGAAGCA TTTTTAATTG GATGTAATTA TCTTGGCAAA | 21300 |
| CCACGCGAAC AAATAGATGG TTATGTCATG CATGCAAATT ACATATTTTG GAGGAATACA | 21360 |
| AATCCAATTC AGTTGTCTTC CTATTCTTTA TTTGACATGA GTAAATTTCC CCTTAAATTA | 21420 |
| AGGGGTACTG CTGTTATGTC TTTAAAAGAA GGTCAAATCA ATGATATGAT TTTATCTCTT | 21480 |
| CTTAGTAAAG GTAGACTTAT AATTAGAGAA AACAACAGAG TTGTTATTTC TAGTGATGTT | 21540 |
| CTTGTTAACA ACTAAACGAA CAATGTTTGT TTTTCTTGTT TTATTGCCAC TAGTCTCTAG | 21600 |
| TCAGTGTGTT AATCTTACAA CCAGAACTCA ATTACCCCCT GCATACACTA ATTCTTTCAC | 21660 |
| ACGTGGTGTT TATTACCCTG ACAAAGTTTT CAGATCCTCA GTTTTACATT CAACTCAGGA | 21720 |
| CTTGTTCTTA CCTTTCTTTT CCAATGTTAC TTGGTTCCAT GCTATACATG TCTCTGGGAC | 21780 |
| CAATGGTACT AAGAGGTTTG ATAACCCTGT CCTACCATTT AATGATGGTG TTTATTTTGC | 21840 |
| TTCCACTGAG AAGTCTAACA TAATAAGAGG CTGGATTTTT GGTACTACTT TAGATTCGAA | 21900 |
| GACCCAGTCC CTACTTATTG TTAATAACGC TACTAATGTT GTTATTAAAG TCTGTGAATT | 21960 |
| TCAATTTTGT AATGATCCAT TTTTGGGTGT TTATTACCAC AAAAACAACA AAAGTTGGAT | 22020 |
| GGAAAGTGAG TTCAGAGTTT ATTCTAGTGC GAATAATTGC ACTTTTGAAT ATGTCTCTCA | 22080 |
| GCCTTTTCTT ATGGACCTTG AAGGAAAACA GGGTAATTTC AAAAATCTTA GGGAATTTGT | 22140 |
| GTTTAAGAAT ATTGATGGTT ATTTTAAAAT ATATTCTAAG CACACGCCTA TTAATTTAGT | 22200 |
| GCGTGATCTC CCTCAGGGTT TTTCGGCTTT AGAACCATTG GTAGATTTGC CAATAGGTAT | 22260 |
| TAACATCACT AGGTTTCAAA CTTTACTTGC TTTACATAGA AGTTATTTGA CTCCTGGTGA | 22320 |
| TTCTTCTTCA GGTTGGACAG CTGGTGCTGC AGCTTATTAT GTGGGTTATC TTCAACCTAG | 22380 |
| GACTTTTCTA TTAAAATATA ATGAAAATGG AACCATTACA GATGCTGTAG ACTGTGCACT | 22440 |
| TGACCCTCTC TCAGAAACAA AGTGTACGTT GAAATCCTTC ACTGTAGAAA AAGGAATCTA | 22500 |
| TCAAACTTCT AACTTTAGAG TCCAACCAAC AGAATCTATT GTTAGATTTC CTAATATTAC | 22560 |
| AAACTTGTGC CCTTTTGGTG AAGTTTTTAA CGCCACCAGA TTTGCATCTG TTTATGCTTG | 22620 |
| GAACAGGAAG AGAATCAGCA ACTGTGTTGC TGATTATTCT GTCCTATATA ATTCCGCATC | 22680 |
| ATTTTCCACT TTTAAGTGTT ATGGAGTGTC TCCTACTAAA TTAAATGATC TCTGCTTTAC | 22740 |
| TAATGTCTAT GCAGATTCAT TTGTAATTAG AGGTGATGAA GTCAGACAAA TCGCTCCAGG | 22800 |
| GCAAACTGGA AAGATTGCTG ATTATAATTA TAAATTACCA GATGATTTTA CAGGCTGCGT | 22860 |
| TATAGCTTGG AATTCTAACA ATCTTGATTC TAAGGTTGGT GGTAATTATA ATTACCTGTA | 22920 |
| TAGATTGTTT AGGAAGTCTA ATCTCAAACC TTTTGAGAGA GATATTTCAA CTGAAATCTA | 22980 |
| TCAGGCCGGT AGCACACCTT GTAATGGTGT TGAAGGTTTT AATTGTTACT TTCCTTTACA | 23040 |
| ATCATATGGT TTCCAACCCA CTAATGGTGT TGGTTACCAA CCATACAGAG TAGTAGTACT | 23100 |
| TTCTTTTGAA CTTCTACATG CACCAGCAAC TGTTTGTGGA CCTAAAAAGT CTACTAATTT | 23160 |
| GGTTAAAAAC AAATGTGTCA ATTTCAACTT CAATGGTTTA ACAGGCACAG GTGTTCTTAC | 23220 |
| TGAGTCTAAC AAAAAGTTTC TGCCTTTCCA ACAATTTGGC AGAGACATTG CTGACACTAC | 23280 |
| TGATGCTGTC CGTGATCCAC AGACACTTGA GATTCTTGAC ATTACACCAT GTTCTTTTGG | 23340 |
| TGGTGTCAGT GTTATAACAC CAGGAACAAA TACTTCTAAC CAGGTTGCTG TTCTTTATCA | 23400 |
| GGATGTTAAC TGCACAGAAG TCCCTGTTGC TATTCATGCA GATCAACTTA CTCCTACTTG | 23460 |
| GCGTGTTTAT TCTACAGGTT CTAATGTTTT TCAAACACGT GCAGGCTGTT TAATAGGGGC | 23520 |
| TGAACATGTC AACAACTCAT ATGAGTGTGA CATACCCATT GGTGCAGGTA TATGCGCTAG | 23580 |
| TTATCAGACT CAGACTAATT CTCCTCGGCG GGCACGTAGT GTAGCTAGTC AATCCATCAT | 23640 |
| TGCCTACACT ATGTCACTTG GTGCAGAAAA TTCAGTTGCT TACTCTAATA ACTCTATTGC | 23700 |
| CATACCCACA AATTTTACTA TTAGTGTTAC CACAGAAATT CTACCAGTGT CTATGACCAA | 23760 |
| GACATCAGTA GATTGTACAA TGTACATTTG TGGTGATTCA ACTGAATGCA GCAATCTTTT | 23820 |
| GTTGCAATAT GGCAGTTTTT GTACACAATT AAACCGTGCT TTAACTGGAA TAGCTGTTGA | 23880 |
| ACAAGACAAA AACACCCAAG AAGTTTTTGC ACAAGTCAAA CAAATTTACA AAACACCACC | 23940 |
| AATTAAAGAT TTTGGTGGTT TTAATTTTTC ACAAATATTA CCAGATCCAT CAAAACCAAG | 24000 |
| CAAGAGGTCA TTTATTGAAG ATCTACTTTT CAACAAAGTG ACACTTGCAG ATGCTGGCTT | 24060 |
| CATCAAACAA TATGGTGATT GCCTTGGTGA TATTGCTGCT AGAGACCTCA TTTGTGCACA | 24120 |
| AAAGTTTAAC GGCCTTACTG TTTTGCCACC TTTGCTCACA GATGAAATGA TTGCTCAATA | 24180 |
| CACTTCTGCA CTGTTAGCGG GTACAATCAC TTCTGGTTGG ACCTTTGGTG CAGGTGCTGC | 24240 |
| ATTACAAATA CCATTTGCTA TGCAAATGGC TTATAGGTTT AATGGTATTG GAGTTACACA | 24300 |
| GAATGTTCTC TATGAGAACC AAAAATTGAT TGCCAACCAA TTTAATAGTG CTATTGGCAA | 24360 |
| AATTCAAGAC TCACTTTCTT CCACAGCAAG TGCACTTGGA AAACTTCAAG ATGTGGTCAA | 24420 |
| CCAAAATGCA CAAGCTTTAA ACACGCTTGT TAAACAACTT AGCTCCAATT TTGGTGCAAT | 24480 |
| TTCAAGTGTT TTAAATGATA TCCTTTCACG TCTTGACAAA GTTGAGGCTG AAGTGCAAAT | 24540 |
| TGATAGGTTG ATCACAGGCA GACTTCAAAG TTTGCAGACA TATGTGACTC AACAATTAAT | 24600 |
| TAGAGCTGCA GAAATCAGAG CTTCTGCTAA TCTTGCTGCT ACTAAAATGT CAGAGTGTGT | 24660 |
| ACTTGGACAA TCAAAAAGAG TTGATTTTTG TGGAAAGGGC TATCATCTTA TGTCCTTCCC | 24720 |
| TCAGTCAGCA CCTCATGGTG TAGTCTTCTT GCATGTGACT TATGTCCCTG CACAAGAAAA | 24780 |
| GAACTTCACA ACTGCTCCTG CCATTTGTCA TGATGGAAAA GCACACTTTC CTCGTGAAGG | 24840 |
| TGTCTTTGTT TCAAATGGCA CACACTGGTT TGTAACACAA AGGAATTTTT ATGAACCACA | 24900 |
| AATCATTACT ACAGACAACA CATTTGTGTC TGGTAACTGT GATGTTGTAA TAGGAATTGT | 24960 |
| CAACAACACA GTTTATGATC CTTTGCAACC TGAATTAGAC TCATTCAAGG AGGAGTTAGA | 25020 |
| TAAATATTTT AAGAATCATA CATCACCAGA TGTTGATTTA GGTGACATCT CTGGCATTAA | 25080 |
| TGCTTCAGTT GTAAACATTC AAAAAGAAAT TGACCGCCTC AATGAGGTTG CCAAGAATTT | 25140 |
| AAATGAATCT CTCATCGATC TCCAAGAACT TGGAAAGTAT GAGCAGTATA TAAAATGGCC | 25200 |
| ATGGTACATT TGGCTAGGTT TTATAGCTGG CTTGATTGCC ATAGTAATGG TGACAATTAT | 25260 |
| GCTTTGCTGT ATGACCAGTT GCTGTAGTTG TCTCAAGGGC TGTTGTTCTT GTGGATCCTG | 25320 |
| CTGCAAATTT GATGAAGACG ACTCTGAGCC AGTGCTCAAA GGAGTCAAAT TACATTACAC | 25380 |
| ATAAACGAAC TTATGGATTT GTTTATGAGA ATCTTCACAA TTGGAACTGT AACTTTGAAG | 25440 |
| CAAGGTGAAA TCAAGGATGC TACTCCTTCA GATTTTGTTC GCGCTACTGC AACGATACCG | 25500 |
| ATACAAGCCT CACTCCCTTT CGGATGGCTT ATTGTTGGCG TTGCACTTCT TGCTGTTTTT | 25560 |
| CAGAGCGCTT CCAAAATCAT AACCCTCAAA AAGAGATGGC AACTAGCACT CTCCAAGGGT | 25620 |
| GTTCACTTTG TTTGCAACTT GCTGTTGTTG TTTGTAACAG TTTACTCACA CCTTTTGCTC | 25680 |
| GTTGCTGCTG GCCTTGAAGC CCCTTTTCTC TATCTTTATG CTTTAGTCTA CTTCTTGCAG | 25740 |
| AGTATAAACT TTGTAAGAAT AATAATGAGG CTTTGGCTTT GCTGGAAATG CCGTTCCAAA | 25800 |
| AACCCATTAC TTTATGATGC CAACTATTTT CTTTGCTGGC ATACTAATTG TTACGACTAT | 25860 |
| TGTATACCTT ACAATAGTGT AACTTCTTCA ATTGTCATTA CTTCAGGTGA TGGCACAACA | 25920 |
| AGTCCTATTT CTGAACATGA CTACCAGATT GGTGGTTATA CTGAAAAATG GGAATCTGGA | 25980 |
| GTAAAAGACT GTGTTGTATT ACACAGTTAC TTCACTTCAG ACTATTACCA GCTGTACTCA | 26040 |
| ACTCAATTGA GTACAGACAC TGGTGTTGAA CATGTTACCT TCTTCATCTA CAATAAAATT | 26100 |
| GTTGATGAGC CTGAAGAACA TGTCCAAATT CACACAATCG ACGGTTCATC CGGAGTTGTT | 26160 |
| AATCCAGTAA TGGAACCAAT TTATGATGAA CCGACGACGA CTACTAGCGT GCCTTTGTAA | 26220 |
| GCACAAGCTG ATGAGTACGA ACTTATGTAC TCATTCGTTT CGGAAGAGAC AGGTACGTTA | 26280 |
| ATAGTTAATA GCGTACTTCT TTTTCTTGCT TTCGTGGTAT TCTTGCTAGT TACACTAGCC | 26340 |
| ATCCTTACTG CGCTTCGATT GTGTGCGTAC TGCTGCAATA TTGTTAACGT GAGTCTTGTA | 26400 |
| AAACCTTCTT TTTACGTTTA CTCTCGTGTT AAAAATCTGA ATTCTTCTAG AGTTCCTGAT | 26460 |
| CTTCTGGTCT AAACGAACTA AATATTATAT TAGTTTTTCT GTTTGGAACT TTAATTTTAG | 26520 |
| CCATGGCAGA TTCCAACGGT ACTATTACCG TTGAAGAGCT TAAAAAGCTC CTTGAACAAT | 26580 |
| GGAACCTAGT AATAGGTTTC CTATTCCTTA CATGGATTTG TCTTCTACAA TTTGCCTATG | 26640 |
| CCAACAGGAA TAGGTTTTTG TATATAATTA AGTTAATTTT CCTCTGGCTG TTATGGCCAG | 26700 |
| TAACTTTAGC TTGTTTTGTG GTTGCTGCTG TTTACAGAAT AAATTGGATC ACCGGTGGAA | 26760 |
| TTGCTATCGC AATGGCTTGT CTTGTAGGCT TGATGTGGCT CAGCTACTTC ATTGCTTCTT | 26820 |
| TCAGACTGTT TGCGCGTACG CGTTCCATGT GGTCATTCAA TCCAGAAACT AACATTCTTC | 26880 |
| TCAACGTGCC ACTCCATGGC ACTATTCTGA CCAGACCGCT TCTAGAAAGT GAACTCGTAA | 26940 |
| TCGGAGCTGT GATCCTTCGT GGACATCTTC GTATTGCTGG ACACCATCTA GGACGCTGTG | 27000 |
| ACATCAAGGA CCTGCCTAAA GAAATCACTG TTGCTACATC ACGAACGCTT TCTTATTACA | 27060 |
| AATTGGGAGC TTCGCAGCGT GTAGCAGGTG ACTCAGGTTT TGCTGCATAC AGTCGCTACA | 27120 |
| GGATTGGCAA CTATAAATTA AACACAGACC ATTCCAGTAG CAGTGACAAT ATTGCTTTGC | 27180 |
| TTGTACAGTA AGTGACAACA GATGTTTCAT CTCGTTGACT TTCAGGTTAC TATAGCAGAG | 27240 |
| ATATTACTAA TTATTATGAG GACTTTTAAA GTTTCCATTT GGAATCTTGA TTACATCATA | 27300 |
| AACCTCATAA TTAAAAATTT ATCTAAGTCA CTAACTGAGA ATAAATATTC TCAATTAGAT | 27360 |
| GAAGAGCAAC CAATGGAGAT TGATTAAACG AACATGAAAA TTATTCTTTT CTTGGCACTG | 27420 |
| ATAACACTCG CTACTTGTGA GCTTTATCAC TACCAAGAGT GTGTTAGAGG TACAACAGTA | 27480 |
| CTTTTAAAAG AACCTTGCTC TTCTGGAACA TACGAGGGCA ATTCACCATT TCATCCTCTA | 27540 |
| GCTGATAACA AATTTGCACT GACTTGCTTT AGCACTCAAT TTGCTTTTGC TTGTCCTGAC | 27600 |
| GGCGTAAAAC ACGTCTATCA GTTACGTGCC AGATCAGTTT CACCTAAACT GTTCATCAGA | 27660 |
| CAAGAGGAAG TTCAAGAACT TTACTCTCCA ATTTTTCTTA TTGTTGCGGC AATAGTGTTT | 27720 |
| ATAACACTTT GCTTCACACT CAAAAGAAAG ACAGAATGAT TGAACTTTCA TTAATTGACT | 27780 |
| TCTATTTGTG CTTTTTAGCC TTTCTGCTAT TCCTTGTTTT AATTATGCTT ATTATCTTTT | 27840 |
| GGTTCTCACT TGAACTGCAA GATCATAATG AAACTTGTCA CGCCTAAACG AACATGAAAT | 27900 |
| TTCTTGTTTT CTTAGGAATC ATCACAACTG TAGCTGCATT TCACCAAGAA TGTAGTTTAC | 27960 |
| AGTCATGTAC TCAACATCAA CCATATGTAG TTGATGACCC GTGTCCTATT CACTTCTATT | 28020 |
| CTAAATGGTA TATTAGAGTA GGAGCTAGAA AATCAGCACC TTTAATTGAA TTGTGCGTGG | 28080 |
| ATGAGGCTGG TTCTAAATCA CCCATTCAGT ACATCGATAT CGGTAATTAT ACAGTTTCCT | 28140 |
| GTTTACCTTT TACAATTAAT TGCCAGGAAC CTAAATTGGG TAGTCTTGTA GTGCGTTGTT | 28200 |
| CGTTCTATGA AGACTTTTTA GAGTATCATG ACGTTCGTGT TGTTTTAGAT TTCATCTAAA | 28260 |
| CGAACAAACT AAAATGTCTG ATAATGGACC CCAAAATCAG CGAAATGCAC CCCGCATTAC | 28320 |
| GTTTGGTGGA CCCTCAGATT CAACTGGCAG TAACCAGAAT GGAGAACGCA GTGGGGCGCG | 28380 |
| ATCAAAACAA CGTCGGCCCC AAGGTTTACC CAATAATACT GCGTCTTGGT TCACCGCTCT | 28440 |
| CACTCAACAT GGCAAGGAAG ACCTTAAATT CCCTCGAGGA CAAGGCGTTC CAATTAACAC | 28500 |
| CAATAGCAGT CCAGATGACC AAATTGGCTA CTACCGAAGA GCTACCAGAC GAATTCGTGG | 28560 |
| TGGTGACGGT AAAATGAAAG ATCTCAGTCC AAGATGGTAT TTCTACTACC TAGGAACTGG | 28620 |
| GCCAGAAGCT GGACTTCCCT ATGGTGCTAA CAAAGACGGC ATCATATGGG TTGCAACTGA | 28680 |
| GGGAGCCTTG AATACACCAA AAGATCACAT TGGCACCCGC AATCGTGCTA ACAATGCTGC | 28740 |
| AATCGTGCTA CAACTTCCTC AAGGAACAAC ATTGCCAAAA GGCTTCTACG CAGAAGGGAG | 28800 |
| CAGAGGCGGC AGTCAAGCCT CTTCTCGTTC CTCATCACGT AGTCGCAACA GTTCAAGAAA | 28860 |
| TTCAACTCCA GGCAGCAGTA GGGGAACTTC TCCTGCTAGA ATGGCTGGCA ATGGCGGTGA | 28920 |
| TGCTGCTCTT GCTTTGCTGC TGCTTGACAG ATTGAACCAG CTTGAGAGCA AAATGTCTGG | 28980 |
| TAAAGGCCAA CAACAACAAG GCCAAACTGT CACTAAGAAA TCTGCTGCTG AGGCTTCTAA | 29040 |
| GAAGCCTCGG CAAAAACGTA CTGCCACTAA AGCATACAAT GTAACACAAG CTTTCGGCAG | 29100 |
| ACGTGGTCCA GAACAAACCC AAGGAAATTT TGGGGACCAG GAACTAATCA GACAAGGAAC | 29160 |
| TGATTACAAA CATTGGCCGC AAATTGCACA ATTTGCCCCC AGCGCTTCAG CGTTCTTCGG | 29220 |
| AATGTCGCGC ATTGGCATGG AAGTCACACC TTCGGGAACG TGGTTGACCT ACACAGGTGC | 29280 |
| CATCAAATTG GATGACAAAG ATCCAAATTT CAAAGATCAA GTCATTTTGC TGAATAAGCA | 29340 |
| TATTGACGCA TACAAAACAT TCCCACCAAC AGAGCCTAAA AAGGACAAAA AGAAGAAGGC | 29400 |
| TGATGAAACT CAAGCCTTAC CGCAGAGACA GAAGAAACAG CAAACTGTGA CTCTTCTTCC | 29460 |
| TGCTGCAGAT TTGGATGATT TCTCCAAACA ATTGCAACAA TCCATGAGCA GTGCTGACTC | 29520 |
| AACTCAGGCC TAAACTCATG CAGACCACAC AAGGCAGATG GGCTATATAA ACGTTTTCGC | 29580 |
| TTTTCCGTTT ACGATATATA GTCTACTCTT GTGCAGAATG AATTCTCGTA ACTACATAGC | 29640 |
| ACAAGTAGAT GTAGTTAACT TTAATCTCAC ATAGCAATCT TTAATCAGTG TGTAACATTA | 29700 |
| GGGAGGACTT GAAAGAGCCA CCACATTTTC ACCGAGGCCA CGCGGAGTAC GATCGAGTGT | 29760 |
| ACAGTGAACA ATGCTAGGGA GAGCTGCCTA TATGGAAGAG CCCTAATGTG TAAAATTAAT | 29820 |
| TTTAGTAGTG CTATCCCCAT GTGATTTTAA TAGCTTCTTA GGAGAATGAC AAAAAAAAAA | 29880 |
| AAAAAAAAAA AAAAAAAAAA AAA | 29903 |

```
SEQ ID NO: 2-a wild type amino acid sequence of Spike (3) protein of Severe
Acute Respiratory Syndrome Coronavirus 2 (SARS-CoV-2) (Wu et al. 2020 Nature
579:265-269; GenBank Accession QHD43416.1 entitled ″Surface Glycoprotein
[Severe Acute Respiratory Syndrome Coronavirus 2]″-encoded by nucleotides
21563-25384 of SEQ ID NO: 1) having the features N'-C' as follows (see also
Wrapp et al. 2020 Science 367(6483):1260-1263 and Supplementary Materials as
well as corresponding Protein Data Bank (PDB) accession 6VSB version 1.4
entitled ″Prefusion 2019-nCoV spike glycoprotein with a single receptor-
binding domain up″; UniProtKB Accession PODTC2 version 1 dated 22April2020):
Signal peptide residues 1-15 (underlined)
N-Terminal Domain (NTD) residues V16-S305 (double underlined)
Receptor Binding Domain (RBD) residues P330 to P521 (underlined)
Residue D614 (underlined)
Furin Recognition Site (FRS or 31/32 protease cleavage site) residues R682,
R683, A684, and R685 (underlined)
Fusion Peptide (FP) residues S816 to F833 (underlined)
Heptad Repeat 1 (HR1) residues G908 to D985 (double underlined)
Central Helix (CH) residues K986 to G1035 (underlined)
Connector Domain (CD) residues T1076 to L1141 (underlined)
                  10 20 30 40 50 60
MFVFLVLLPL VSSQCVNLTT RTQLPPAYTN SFTRGVYYPD KVFRSSVLHS TQDLFLPFFS
                  70 80 90 100 110 120
NVTWFHAIHV SGTNGTKRFD NPVLPFNDGV YFASTEKSNI IRGWIFGTTL DSKTQSLLIV
                  130 140 150 160 170 180
NNATNVVIKV CEFQFCNDPF LGVYYHKNNK SWMESEFRVY SSANNCTFEY VSQPFLMDLE
                  190 200 210 220 230 240
GKQGNFKNLR EFVFKNIDGY FKIYSKHTPI NLVRDLPQGF SALEPLVDLP IGINITRFQT
                  250 260 270 280 290 300
LLALHRSYLT PGDSSSGWTA GAAAYYVGYL QPRTFLLKYN ENGTITDAVD CALDPLSETK
                  310 320 330 340 350 360
CTLKSFTVEK GIYQTSNFRV QPTESIVRFP NITNLCPFGE VFNATRFASV YAWNRKRISN
                  370 380 390 400 410 420
CVADYSVLYN SASFSTFKCY GVSPTKLNDL CFTNVYADSF VIRGDEVRQI APGQTGKIAD
                  430 440 450 460 470 480
YNYKLPDDFT GCVIAWNSNN LDSKVGGNYN YLYRLFRKSN LKPFERDIST EIYQAGSTPC
                  490 500 510 520 530 540
NGVEGFNCYF PLQSYGFQPT NGVGYQPYRV VVLSFELLHA PATVCGPKKS TNLVKNKCVN
                  550 560 570 580 590 600
FNFNGLTGTG VLTESNKKFL PFQQFGRDIA DTTDAVRDPQ TLEILDITPC SFGGVSVITP
                  610 620 630 640 650 660
GTNTSNQVAV LYQDVNCTEV PVAIHADQLT PTWRVYSTGS NVFQTRAGCL IGAEHVNNSY
                  670 680 690 700 710 720
ECDIPIGAGI CASYQTQTNS PRRARSVASQ SIIAYTMSLG AENSVAYSNN SIAIPTNFTI
                  730 740 750 760 770 780
SVTTEILPVS MTKTSVDCTM YICGDSTECS NLLLQYGSFC TQLNRALTGI AVEQDKNTQE
                  790 800 810 820 830 840
VFAQVKQIYK TPPIKDFGGF NFSQILPDPS KPSKRSFIED LLFNKVTLAD AGFIKQYGDC
                  850 860 870 880 890 900
LGDIAARDLI CAQKFNGLTV LPPLLTDEMI AQYTSALLAG TITSGWTFGA GAALQIPFAM
                  910 920 930 940 950 960
QMAYRFNGIG VTQNVLYENQ KLIANQFNSA IGKIQDSLSS TASALGKLQD VVNQNAQALN
                  970 980 990 1000 1010 1020
TLVKQLSSNF GAISSVLNDI LSRLDKVEAE VQIDRLITGR LQSLQTYVTQ QLIRAAEIRA
                1030 1040 1050 1060 1070 1080
SANLAATKMS ECVLGQSKRV DFCGKGYHLM SFPQSAPHGV VFLHVTYVPA QEKNFTTAPA
                1090 1100 1110 1120 1130 1140
ICHDGKAHFP REGVFVSNGT HWFVTQRNFY EPQIITTDNT FVSGNCDVVI GIVNNTVYDP
                1150 1160 1170 1180 1190 1200
LQPELDSFKE ELDKYFKNHT SPDVDLGDIS GINASVVNIQ KEIDRLNEVA KNLNESLIDL
                1210 1220 1230 1240 1250 1260
QELGKYEQYI KWPWYIWLGF IAGLIAIVMV TIMLCCMTSC CSCLKGCCSC GSCCKFDEDD
                1270 1273
SEPVLKGVKL HYT
SEQ ID NO: 3-residues 27-1208 of the Spike (S) protein amino acid sequence
SEQ ID NO: 2 having the features N'-C' as follows:
A subsequence of the N-Terminal Domain (NTD) , here as residues A1-S279
(double underlined)
Receptor Binding Domain (RBD) residues P304 to P495 (underlined)
Residue D588 (underlined)
Furin Recognition Site (FRS or S1/S2 protease cleavage site) residues R656,
R657, A658, and R659 (underlined)
Fusion Peptide (FP) residues S790 to F807 (underlined)
Heptad Repeat 1 (HR1) residues G882 to D959 (double underlined)
Central Helix (CH) residues K960 to G1009 (underlined)
Connector Domain (CD) residues T1050 to L1115 (underlined)
                  10 20 30 40 50 60
AYTNSFTRGV YYPDKVFRSS VLHSTQDLFL PFFSNVTWFH AIHVSGTNGT KRFDNPVLPF
                  70 80 90 100 110 120
NDGVYFASTE KSNIIRGWIF GTTLDSKTQS LLIVNNATNV VIKVCEFQFC NDPFLGVYYH
                  130 140 150 160 170 180
KNNKSWMESE FRVYSSANNC TFEYVSQPFL MDLEGKQGNF KNLREFVFKN IDGYFKIYSK
                  190 200 210 220 230 240
HTPINLVRDL PQGFSALEPL VDLPIGINIT RFQTLLALHR SYLTPGDSSS GWTAGAAAYY
                  250 260 270 280 290 300
VGYLQPRTFL LKYNENGTIT DAVDCALDPL SETKCTLKSF TVEKGIYQTS NFRVQPTESI
                  310 320 330 340 350 360
VRFPNITNLC PFGEVFNATR FASVYAWNRK RISNCVADYS VLYNSASFST FKCYGVSPTK
                  370 380 390 400 410 420
LNDLCFTNVY ADSFVIRGDE VRQIAPGQTG KIADYNYKLP DDFTGCVIAW NSNNLDSKVG
                  430 440 450 460 470 480
GNYNYLYRLF RKSNLKPFER DISTEIYQAG STPCNGVEGF NCYFPLQSYG FQPTNGVGYQ
                  490 500 510 520 530 540
PYRVVVLSFE LLHAPATVCG PKKSTNLVKN KCVNFNFNGL TGTGVLTESN KKFLPFQQFG
                  550 560 570 580 590 600
RDIADTTDAV RDPQTLEILD ITPCSFGGVS VITPGTNTSN QVAVLYQDVN CTEVPVAIHA
                  610 620 630 640 650 660
DQLTPTWRVY STGSNVFQTR AGCLIGAEHV NNSYECDIPI GAGICASYQT QTNSPRRARS
                  670 680 690 700 710 720
VASQSIIAYT MSLGAENSVA YSNNSIAIPT NFTISVTTEI LPVSMTKTSV DCTMYICGDS
                  730 740 750 760 770 780
TECSNLLLQY GSFCTQLNRA LTGIAVEQDK NTQEVFAQVK QIYKTPPIKD FGGFNFSQIL
                  790 800 810 820 830 840
PDPSKPSKRS FIEDLLFNKV TLADAGFIKQ YGDCLGDIAA RDLICAQKFN GLTVLPPLLT
                  850 860 870 880 890 900
DEMIAQYTSA LLAGTITSGW TFGAGAALQI PFAMQMAYRF NGIGVTQNVL YENQKLIANQ
                  910 920 930 940 950 960
FNSAIGKIQD SLSSTASALG KLQDVVNQNA QALNTLVKQL SSNFGAISSV LNDILSRLDK
                  970 980 990 1000 1010 1020
VEAEVQIDRL ITGRLQSLQT YVTQQLIRAA EIRASANLAA TKMSECVLGQ SKRVDFCGKG
                  1030 1040 1050 1060 1070 1080
YHLMSFPQSA PHGVVFLHVT YVPAQEKNFT TAPAICHDGK AHFPREGVFV SNGTHWFVTQ
                  1090 1100 1110 1120 1121
RNFYEPQIIT TDNTFVSGNC DVVIGIVNNT VYDPLQPELD S
SEQ ID NO: 4-mutant Spike (S) protein amino acid sequence having the
features N'-C' (as compared to SEQ ID NO: 3) as follows (see Brufsky
20April2020 J Med Virol, 7 pages, doi:10.1002/jmv.25902 and Korber et al.
2020 bioRxiv (HyperTextTransferProtocolsecure:
//doi.org/10.1101/2020.04.29.069054); Wrapp et al. 2020 Science
367 (6483):1260-1263 and Supplementary Materials as well as corresponding
Protein Data Bank (PDB) accession 6VSB version 1.4 entitled ″Prefusion 2019-
nCoV spike glycoprotein with a single receptor-binding domain up″):
D588G substitution (underlined) site
R656G,R657S, and R659S Substitutions at the furin recognition
(underlined)
K960P and V961P substitutions at the Central Helix (CH) (underlined)
                  10 20 30 40 50 60
AYTNSFTRGV YYPDKVFRSS VLHSTQDLFL PFFSNVTWFH AIHVSGTNGT KRFDNPVLPF
                  70 80 90 100 110 120
NDGVYFASTE KSNIIRGWIF GTTLDSKTQS LLIVNNATNV VIKVCEFQFC NDPFLGVYYH
                  130 140 150 160 170 180
KNNKSWMESE FRVYSSANNC TFEYVSQPFL MDLEGKQGNF KNLREFVFKN IDGYFKIYSK
                  190 200 210 220 230 240
HTPINLVRDL PQGFSALEPL VDLPIGINIT RFQTLLALHR SYLTPGDSSS GWTAGAAAYY
                  250 260 270 280 290 300
VGYLQPRTFL LKYNENGTIT DAVDCALDPL SETKCTLKSF TVEKGIYQTS NFRVQPTESI
                  310 320 330 340 350 360
VRFPNITNLC PFGEVFNATR FASVYAWNRK RISNCVADYS VLYNSASFST FKCYGVSPTK
                  370 380 390 400 410 420
LNDLCFTNVY ADSFVIRGDE VRQIAPGQTG KIADYNYKLP DDFTGCVIAW NSNNLDSKVG
                  430 440 450 460 470 480
GNYNYLYRLF RKSNLKPFER DISTEIYQAG STPCNGVEGF NCYFPLQSYG FQPTNGVGYQ
                  490 500 510 520 530 540
PYRVVVLSFE LLHAPATVCG PKKSTNLVKN KCVNFNFNGL TGTGVLTESN KKFLPFQQFG
                  550 560 570 580 590 600
RDIADTTDAV RDPQTLEILD ITPCSFGGVS VITPGTNTSN QVAVLYOGVN CTEVPVAIHA
                  610 620 630 640 650 660
DQLTPTWRVY STGSNVFQTR AGCLIGAEHV NNSYECDIPI GAGICASYQT QTNSPGSASS
                  670 680 690 700 710 720
VASQSIIAYT MSLGAENSVA YSNNSIAIPT NFTISVTTEI LPVSMTKTSV DCTMYICGDS
                  730 740 750 760 770 780
TECSNLLLQY GSFCTQLNRA LTGIAVEQDK NTQEVFAQVK QIYKTPPIKD FGGFNFSQIL
                  790 800 810 820 830 840
PDPSKPSKRS FIEDLLFNKV TLADAGFIKQ YGDCLGDIAA RDLICAQKFN GLTVLPPLLT
                  850 860 870 880 890 900
DEMIAQYTSA LLAGTITSGW TFGAGAALQI PFAMQMAYRF NGIGVTQNVL YENQKLIANQ
                  910 920 930 940 950 960
FNSAIGKIQD SLSSTASALG KLQDVVNQNA QALNTLVKQL SSNFGAISSV LNDILSRLDP
                  970 980 990 1000 1010 1020
PEAEVQIDRL ITGRLQSLQT YVTQQLIRAA EIRASANLAA TKMSECVLGQ SKRVDFCGKG
                  1030 1040 1050 1060 1070 1080
YHLMSFPQSA PHGVVFLHVT YVPAQEKNFT TAPAICHDGK AHFPREGVFV SNGTHWFVTQ
                  1090 1100 1110 1120 1121
RNFYEPQIIT TDNTFVSGNC DVVIGIVNNT VYDPLQPELD S
SEQ ID NO: 5-(CoV2_S_1_hbnet) mutant Spike (S) protein amino acid sequence
AYTNSFTRGVYYPDKVSMSSVLHSTQDLFLPFFSNVTWFHAIHVSGTNGTKRFDNPVLPF
NDGVYFASTEKSNIIRGWIFGTTLDSKTQSLLIVNNATNVVIKVCEFQFCNDPFLGVYYH
KNNKSWMESEFRVYSSANNCTFEYVSQPFLMDLEGKQGNFKNLREFVFKNIDGYFKIYSK
HTPINLVRDLPQGFSALELLVDLPIGINITRFQTLLALHRSYLTPGDSSSGWTAGAAAYY
VGYLQPRTFLLKYNENGVITDAVDCALDPLSETKCTLKSFTVEKGIYITSLFEVQPTESI
VRFPNITNLCPFGEVFNATRFASVYAWNRKRISNCVADYSVLYNSASFSTFKCYGVSPTK
LNDLCFTNVYADSFVIRGDEVRQIAPGQTGKIADYNYKLPDDFTGCVIAWNSNNLDSKVG
GNYNYLYRLFRKSNLKPFERDISTEIYQAGSTPCNGVEGFNCYFPLQSYGFQPTNGVGYQ
PYRVVVLSFELNHAPATVCGPKKSTNLVKNKCVNFNFNGLTGTGVLTESNLKFVSTQLFR
VHSANTTLAVRDPQTLEILDIVSCSSGAVSVITPGTNTSNQVAVLYYNVWCTEVPVAIHA
DQLTPTWRVYSTGSNVFQTKAGCLIGAEHVNNSYECDIAIGGGICASYQTQTNSPGSASS
VASQSIIAYWISTGSWNSVDNSNDAIAIATNFTISVTTEILPVSMTKTWVICTLYICGGS
TECSNLLAQYGSFCTELNRALTGIAVEQDKNTWEVFAQVRTIFHTPSIKDFGGFNFSQIL
PDPSKPSKRSFIEDLLFNKVTLADAGFIKQYGDCLGDIAARDLSCHQDSRGLNILSSLLT
DELIAEFTSALLAGTITAGWSFTAGHALNIPWAVQMAWRFAGIGVTENVLAKNQKLIANQ
FNSAIGKIQDSLSSTASALGKLQDVVNQNAQALDELERELSSNFGAISSVLNDILSNLDP
PEAEVQIDRLILGRLMALAAFVTAQLIRAAEIRASANLAATKMAECVAGQSKLVGFCGEG
WHLMSFPQSAPHGVVFLHVTLVAGQTKNFTTALAICHDGKAHIPRNGVFVSNGTHWFVTQ
EQFYEPLIITTDLVLVSGNCDDVIGIVNNTVYDPKQPELDS
SEQ ID NO: 6-(CoV2_S_2_hbnet) mutant Spike (S) protein amino acid sequence
AYTNSFTRGVYYPDKVSMSSVLHSTQDLFLPFFSNVTWFHAIHVSGTNGTKRFDNPVLPF
NDGVYFASTEKSNIIRGWIFGTTLDSKTQSLLIVNNATNVVIKVCEFQFCNDPFLGVYYH
KNNKSWMESEFRVYSSANNCTFEYVSQPFLMDLEGKQGNFKNLREFVFKNIDGYFKIYSK
HTPINLVRDLPQGFSALVLLVDLPIGINITRFQTLLALHRSYLTPGDSSSGWTAGAAAYY
VGYLQPRTFLLKYNENGVITDAVDCALDPLSETKCTLKSFTVEKGIYITSLFKVQPTESI
VRFPNITNLCPFGEVFNATRFASVYAWNRKRISNCVADYSVLYNSASFSTFKCYGVSPTK
LNDLCFTNVYADSFVIRGDEVRQIAPGQTGKIADYNYKLPDDFTGCVIAWNSNNLDSKVG
GNYNYLYRLFRKSNLKPFERDISTEIYQAGSTPCNGVEGFNCYFPLQSYGFQPTNGVGYQ
PYRVVVLSFELNHAPATVCGPKKSTNLVKNKCVNFNFNGLTGTGVLTESNLKFLEFQLFH
VHSANTTLAVRDPQTLEILDIVSCSSGAVSVITPGTNTSNQVAVLYYNVWCTEVPVAIHA
DQLTPTWRVYSTGSNVFQTRAGCLIGAEHVNNSYECDIAIGAGICASYQTQTNSPGSASS
VASQSIIAYQISTGSWNSVDNSNDAIAIATNETISVTTEILPVSMTKTWVICTLYICGGS
TECSNLLAQHGSFCTELNRALTGIAVEQDKNTWEVFATVRTIFHTPSIKDFGGFNFSQIL
PDPSKPSKRSFIEDLLFNKVTLADAGFIKQYGDCLGDIAARDLSCHQDSHGLNILSSLLT
DELIAEFTSALLAGTITAGHTFTAGHASNIPWWAQMAWRFAGIGVTENVLAKNQKLIANQ
FNSAIGKIQDSLSSTASALGKLQDVVNQNAQALDELERELSSNFGAISSVLNDILSNLDP
PEAEVQIDRLILGRLLALAAFVTAQLIRAAEIRASANLAATKMRECVAGQSKLVGFCGEG
WHLMSFPQSAPHGVVFLHVTLVAGQTKNFTTAPAICHDGKAHIPRTGVFVSNGTHWFVTQ
ENFYEPQIITTDNVFVSGNCDDVIGIVNNTVYDPLQPELDS
SEQ ID NO: 7-(CoV2_S_3_hbnet) mutant Spike (S) protein amino acid sequence
AYTNSFTRGVYYPDKVSMSSVLHSTQDLFLPFFSNVTWFHAIHVSGTNGTKRFDNPVLPF
NDGVYFASTEKSNIIRGWIFGTTLDSKTQSLLIVNNATNVVIKVCEFQFCNDPFLGVYYH
KNNKSWMESEFRVYSSANNCTFEYVSQPFLMDLEGKQGNFKNLREFVFKNIDGYFKIYSK
HTPINLVRDLPQGFSALELLVDLPIGINITRFQTLLALHRSYLTPGDSSSGWTAGAAAYY
VGYLQPRTFLLKYNENGVITDAVDCALDPLSETKCTLKSFTVEKGIYDTSTFEVQPTESI
VRFPNITNLCPFGEVFNATRFASVYAWNRKRISNCVADYSVLYNSASFSTFKCYGVSPTK
LNDLCFTNVYADSFVIRGDEVRQIAPGQTGKIADYNYKLPDDFTGCVIAWNSNNLDSKVG
GNYNYLYRLFRKSNLKPFERDISTEIYQAGSTPCNGVEGFNCYFPLQSYGFQPTNGVGYQ
PYRVVVLSFELNHAPATVCGPKKSTNLVKNKCVNFNFNGLTGTGVLTESNLKFVSTQLFR
VHSANTTLAVRDPQTLEILDIVSCSSGRVSVITPGTNTSNQVAVLYRNVWCTEVPVAIHA
DQLTPTWRVYSTGSNVFQTKAGCLIGAEHVNNSYECDIYIGGGICASYQTQTNSPGSASS
VASQSIIAYWISTGSWNSVENSNDAIAIATNFTISVTTEILPVSMTKTHVDCTLYICGGS
TECSNLLAQYGSFCTELNRMLTGIAVEQDKNTWEVFATVRTIFHTPSIKDFGGFNFSQIL
PDPSKPSKRSFIEDLLFNKVTLADAGFIKQYGDCLGDIAARDLSCHQDSRGLNILSSLLT
DELIAEFTSALLAGTITAGWSFTAGAALNIPWWAQMAWRFAGIGVTENVLAKNQKLIANQ
FNSAIGKIQDSLSSTASALGKLQDVVNQNAQALDELERELSSNFGAISSVLNDILSNLDP
PEAEVQIDRLILGRLMALAAFVTAQAIRAAEIRASANLAALKMRICVAGQSKLVGFCGEG
WHLMSFPQSAPHGVVFLHVTLVAGQYKNFTTAPAICHDGKAHIPSTGVFVSNGTHWFVTQ
EQFYEPQIITTDLVIVSGNCDDVIGIVNNTVYDPLQPELDS
SEQ ID NO: 8-(CoV2_S_4_hbnet) mutant Spike (S) protein amino acid sequence
AYTNSFTRGVYYPDKVSMSSVLHSTQDLFLPFFSNVTWFHAIHVSGTNGTKRFDNPVLPF
NDGVYFASTEKSNIIRGWIFGTTLDSKTQSLLIVNNATNVVIKVCEFQFCNDPFLGVYYH
KNNKSWMESEFRVYSSANNCTFEYVSQPFLMDLEGKQGNFKNLREFVFKNIDGYFKIYSK
HTPINLVRDLPQGFSALELLVDLPIGINITRFQTLLALHRSYLTPGDSSSGWTAGAAAYY
VGYLQPRTFLLKYNENGVITDAVDCALDPLSETKCTLKSFTVEKGIYDTSTFKVQPTESI
VRFPNITNLCPFGEVFNATRFASVYAWNRKRISNCVADYSVLYNSASFSTFKCYGVSPTK
LNDLCFTNVYADSFVIRGDEVRQIAPGQTGKIADYNYKLPDDFTGCVIAWNSNNLDSKVG
GNYNYLYRLFRKSNLKPFERDISTEIYQAGSTPCNGVEGFNCYFPLQSYGFQPTNGVGYQ
PYRVVVLSFELNHAPATVCGPKKSTNLVKNKCVNFNFNGLTGTGVLTESNLKFVSTQLFR
VHSANTTLAVRDPQTLEILDIVSCSSGRVSVITPGTNTSNQVAVLYRNVWCTEVPVAIHA
DQLTPTWRVYSTGSNVFQTRAGCLIGAEHVNNSYECDIAIGAGICASYQTQTNSPGSASS
VASQSIIAYQISTGSWNSVDNSNDAIAVATNFTISVTTEILPVSMTKTHVDCTLYICGGS
TECSNLLAQHGSFCTELNRMLTGIAVEQDKNTWEVFATVRTIFHTPSIKDFGGFNFSQIL
PDPSKPSKRSFIEDLLFNKVTLADAGFIKQYGDCLGDIAARDLSCHQDSHGLNILSSLLT
DELIAEFTSALLAGTITAGTTFLAGHACNIPWWAQMAWRFAGIGVTENVLAKNQKLIANQ
FNSAIGKIQDSLSSTASALGKLQDVVNQNAQALAELERELSSNFGAISSVLNDILSNLDP
PEAEVQIDRLILGRLLALAAFVTAQAIRAAEIRASANLAATKMRECVAGQSKLWGFCGEG
WHLMSFPQSAPHGWFLHVTLVAGQTKNFTTAPAICHDGKAHIPRNGVFVSNGTHWFVTQ
EEFYEPLIITTDLVLVSGNCDDVIGIVNNTVYDPLQPELDS
SEQ ID NO: 9-(CoV2_S_5_hbnet) mutant Spike (S) protein amino acid sequence
AYTNSFTRGVYYPDKVSMSSVLHSTQDLFLPFFSNVTWFHAIHVSGTNGTKRFDNPVLPF
NDGVYFASTEKSNIIRGWIFGTTLDSKTQSLLIVNNATNVVIKVCEFQFCNDPFLGVYYH
KNNKSWMESEFRVYSSANNCTFEYVSQPFLMDLEGKQGNFKNLREFVFKNIDGYFKIYSK
HTPINLVRDLPQGFSALELLVDLPIGINITRFQTLLALHRSYLTPGDSSSGWTAGAAAYY
VGYLQPRTFLLKYNENGVITDAVDCALDPLSETKCTLKSFTVEKGIYITSLFKVQPTESI
VRFPNITNLCPFGEVFNATRFASVYAWNRKRISNCVADYSVLYNSASFSTFKCYGVSPTK
LNDLCFTNVYADSFVIRGDEVRQIAPGQTGKIADYNYKLPDDFTGCVIAWNSNNLDSKVG
GNYNYLYRLFRKSNLKPFERDISTEIYQAGSTPCNGVEGFNCYFPLQSYGFQPTNGVGYQ
PYRVVVLSFELNHAPATVCGPKKSTNLVKNKCVNFNENGLTGTGVLTESNLKEVSTQLEM
VHSANTTLGVRDPQTLEILDIVSCSSGAVSVITPGTNTSNQVAVLYYNVWCTEVPVAIHA
DQLTPTWRVYSTGSNVFQTRAGCLIGAEHVNNSYECDIYIGAGICASYQTQTNSPGSASS
VASQSIIAYQISTGSWNSVDNSNDAIAIATNFTISVTTEILPVSMTKTWVICTLYICGGS
TECSNLLAQHGSFCTELNRALTGIAVEQDKNTWEVFATVRTIFHTPSIKDFGGFNFSQIL
PDPSKPSKRSFIEDLLFNKVTLADAGFIKQYGDCLGDIAARDLSCHQDSHGLNILSSLLT
DELIAEFTSALLAGTITAGWSFLAGAALNIPWWAQMAWRFKGIGVTEWVLAINQKLIANQ
FNSAIGKIQDSLSSTASALGKLQDVVNQNAQALDELERELSSNFGAISSVLNDILSNLDP
PEAEVQIDRLILGRLLALQAFVTAQLIRAAEIRASANLAATKMRECVAGQSKLWGFCGEG
WHLMSFPQSAPHGVVFLHVTLVAGQLKNFTTAPAICHDGKAHVPRIGVFVSNGTHWFVTQ
EQFYFPLIITTDLVLVSGNCDDVIGIVNNTVYDPLQPELDS
SEQ ID NO: 10-(CoV2_S2_1_hbnet) mutant Spike (S) protein amino acid
sequence:
AYTNSFTRGVYYPDKVFRSSVLHSTQDLFLPFFSNVTWFHAIHVSGTNGTKRFDNPVLPF
NDGVYFASTEKSNIIRGWIFGTTLDSKTQSLLIVNNATNVVIKVCEFQFCNDPFLGVYYH
KNNKSWMESEFRVYSSANNCTFEYVSQPFLMDLEGKQGNFKNLREFVFKNIDGYFKIYSK
HTPINLVRDLPQGFSALEPLVDLPIGINITRFQTLLALHRSYLTPGDSSSGWTAGAAAYY
VGYLQPRTFLLKYNENGTITDAVDCALDPLSETKCTLKSFTVEKGIYQTSNFRVQPTESI
VRFPNITNLCPFGEVFNATRFASVYAWNRKRISNCVADYSVLYNSASFSTFKCYGVSPTK
LNDLCFTNVYADSFVIRGDEVRQIAPGQTGKIADYNYKLPDDFTGCVIAWNSNNLDSKVG
GNYNYLYRLFRKSNLKPFERDISTEIYQAGSTPCNGVEGFNCYFPLQSYGFQPTNGVGYQ
PYRVVVLSFELLHAPATVCGPKKSTNLVKNKCVNFNFNGLTGTGVLTESNKKFLPFQQFG
RDIADTTDAVRDPQTLEILDITPCSFGGVSVITPGTNTSNQVAVLYQGVNCTEVPVAIHA
DQLTPTWRVYSTGSNVFQTRAGCLIGAEHVNNSYECDIPIGAGICASYQTQTNSPGSASS
VASQSIIAYQISTGSWNSVENSNDAIAIATNFTISVTTEILPVSMTKTWVDCTLYICGGS
TECSNLLAQYGSFCTELNRMLTGIAVEQDKNTWEVFATVRTIFHTPSIKDFGGFNFSQIL
PDPSKPSKRSFIEDLLFNKVTLADAGFIKQYGDCLGDIAARDSSCAQKANGLNILSSLLT
DELIAEFTSALLAGTITAGWSFTAGAALNIPWWAQMAWRFAGIGVTENVLAKNQKLIANQ
FNSAIGKIQDSLSSTASALGKLQDVVNQNAQALAELEKELSSNFGAISSVLNDILSNLDP
PEAEVQIDRLILGRLMALAAFVTAQAIRAAEIRASANLAATKMRECVAGQSKLVGFCGEG
WHLMSFPQSAPHGVVFLHVTLVAGQYKNFTTAPAICHDGKAHIPRNGVFVSNGTHWFVTQ
EQFYEPLIITTDLVLVSGNCDDVIGIVNNTVYDPKQPELDS
SEQ ID NO: 11-(CoV2_S2_2_hbnet) mutant Spike (S) protein amino acid
sequence:
AYTNSFTRGVYYPDKVFRSSVLHSTQDLFLPFFSNVTWFHAIHVSGTNGTKRFDNPVLPF
NDGVYFASTEKSNIIRGWIFGTTLDSKTQSLLIVNNATNVVIKVCEFQFCNDPFLGVYYH
KNNKSWMESEFRVYSSANNCTFEYVSQPFLMDLEGKQGNFKNLREFVFKNIDGYFKIYSK
HTPINLVRDLPQGFSALEPLVDLPIGINITRFQTLLALHRSYLTPGDSSSGWTAGAAAYY
VGYLQPRTFLLKYNENGTITDAVDCALDPLSETKCTLKSFTVEKGIYQTSNFRVQPTESI
VRFPNITNLCPFGEVFNATRFASVYAWNRKRISNCVADYSVLYNSASFSTFKCYGVSPTK
LNDLCFTNVYADSFVIRGDEVRQIAPGQTGKIADYNYKLPDDFTGCVIAWNSNNLDSKVG
GNYNYLYRLFRKSNLKPFERDISTEIYQAGSTPCNGVEGFNCYFPLQSYGFQPTNGVGYQ
PYRVVVLSFELLHAPATVCGPKKSTNLVKNKCVNFNFNGLTGTGVLTESNKKFLPFQQFG
RDIADTTDAVRDPQTLEILDITPCSFGGVSVITPGTNTSNQVAVLYQGVNCTEVPVAIHA
DQLTPTWRVYSTGSNVFQTRAGCLIGAEHVNNSYECDIPIGAGICASYQTQTNSPGSASS
VASQSIIAYQISTGSWNSVDNSNDAIAVATNFTISVTTEILPVSMTKTWVDCTLYICGGS
TECSNLLAQHGSFCTELNRALTGIAVEQDKNTWEVFATVRTIFHTPSIKDFGGFNFSQIL
PDPSKPSKRSFIEDLLFNKVTLADAGFIKQYGDCLGDIAARDSSCAQKANGLNILSHLLT
DELIAEFTSALLAGTITAGTTFLAGHACNIPWWAQMAQRFAGIGVTENVLAKNQKLIANQ
FNSAIGKIQDSLSSTASALGKLQDVVNQNAQALAELEKELSSNFGAISSVLNDILSHLDP
PEAEVQIDRLILGRLLALQAFVTAQLIRAAEIRASANLAATKMRECVAGQSKLWGFCGEG
FHLMSFPQSAPHGVVFLHVTYVAGQTKNFTTAPAICHDGKAHIPRNGTFVSNGTHWFVTQ
DNFYEPLIITTDLVLVSGNCDDVIGIVNNTVYDPLQPELDS
SEQ ID NO: 12-(CoV2_S2_3_hbnet) mutant Spike (S) protein amino acid
sequence:
AYTNSFTRGVYYPDKVFRSSVLHSTQDLFLPFFSNVTWFHAIHVSGTNGTKRFDNPVLPF
NDGVYFASTEKSNIIRGWIFGTTLDSKTOSLLIVNNATNVVIKVCEFQFCNDPFLGVYYH
KNNKSWMESEFRVYSSANNCTFEYVSQPFLMDLEGKQGNFKNLREEVFKNIDGYFKIYSK
HTPINLVRDLPQGFSALEPLVDLPIGINITRFQTLLALHRSYLTPGDSSSGWTAGAAAYY
VGYLQPRTFLLKYNENGTITDAVDCALDPLSETKCTLKSFTVEKGIYQTSNFRVQPTESI
VRFPNITNLCPFGEVFNATRFASVYAWNRKRISNCVADYSVLYNSASFSTFKCYGVSPTK
LNDLCFTNVYADSFVIRGDEVRQIAPGQTGKIADYNYKLPDDFTGCVIAWNSNNLDSKVG
GNYNYLYRLFRKSNLKPFERDISTEIYQAGSTPCNGVEGFNCYFPLQSYGFQPTNGVGYQ
PYRVVVLSFELLHAPATVCGPKKSTNLVKNKCVNFNFNGLTGTGVLTESNKKFLPFQQFG
RDIADTTDAVRDPQTLEILDITPCSFGGVSVITPGTNTSNQVAVLYQGVNCTEVPVAIHA
DQLTPTWRVYSTGSNVFQTRAGCLIGAEHVNNSYECDIPIGAGICASYQTQTNSPGSASS
VASQSIIAYQISTGSWNSVDNSNDAIAIATNFTISVTTEILPVSMTKTWVDCTLYICGGS
TECSNLLAQYGSFCTELNRMLTGIAVEQDKNTWEVFATVRTIFHTPSIKDFGGFNFSQIL
PDPSKPSKRSFIEDLLFNKVTLADAGFIKQYGDCLGDIAARDSSCAQKANGLNILSSLLT
DELIAEFTSALLAGTITAGSTFIAGHALNIPWWAQMAWRFAGIGVTENVLAKNQKLIANQ
FNSAIGKIQDSLSSTASALGKLQDVVNQNAQALAELEKELSSNFGAISSVLNDILSNLDP
PEAEVQIDRLILGRLMALAAFVTAQAIRAAEIRASANLAATKMRECVNGQSKLHGFCGEG
WHLMSFPQSAPHGVVFLHVTLVAGQSKNFTTAPAICHDGKAHIPRNGTFVSNGTHWFVTQ
WEFYEPLIITTDLVLVSGNCDDVIGIVNNTVYDPLQPELDS
SEQ ID NO: 13-(CoV2_S2_4_hbnet) mutant Spike (S) protein amino acid
sequence:
AYTNSFTRGVYYPDKVFRSSVLHSTQDLFLPFFSNVTWFHAIHVSGTNGTKRFDNPVLPF
NDGVYFASTEKSNIIRGWIFGTTLDSKTQSLLIVNNATNVVIKVCEFQFCNDPFLGVYYH
KNNKSWMESEFRVYSSANNCTFEYVSQPFLMDLEGKQGNFKNLREFVFKNIDGYFKIYSK
HTPINLVRDLPQGFSALEPLVDLPIGINITRFQTLLALHRSYLTPGDSSSGWTAGAAAYY
VGYLQPRTFLLKYNENGTITDAVDCALDPLSETKCTLKSFTVEKGIYQTSNFRVQPTESI
VRFPNITNLCPFGEVFNATRFASVYAWNRKRISNCVADYSVLYNSASFSTFKCYGVSPTK
LNDLCFTNVYADSFVIRGDEVRQIAPGQTGKIADYNYKLPDDFTGCVIAWNSNNLDSKVG
GNYNYLYRLFRKSNLKPFERDISTEIYQAGSTPCNGVEGFNCYFPLQSYGFQPTNGVGYQ
PYRVVVLSFELLHAPATVCGPKKSTNLVKNKCVNFNFNGLTGTGVLTESNKKFLPFQQFG
RDIADTTDAVRDPQTLEILDITPCSFGGVSVITPGTNTSNQVAVLYQGVNCTEVPVAIHA
DQLTPTWRVYSTGSNVFQTRAGCLIGAEHVNNSYECDIPIGAGICASYQTQTNSPGSASS
VASQSIIAYQISTGSWNSVDNSNDAIAIATNFTISVTTEILPVSMTKTWVDCTLYICGGS
TECSNLLAQYGSFCTELNRMLTGIAVEQDKNTWEVFATVRTIFHTPSIKDFGGFNFSQIL
PDPSKPSKRSFIEDLLFNKVTLADAGFIKQYGDCLGDIAARDSSCAQKANGLNILSHLLT
DELIAEFTSALLAGTITAGWSFLAGHALNIPWAEQMAWRFAGIGVTENVLAKNQKLIANQ
FNSAIGKIQDSLSSTASALGKLQDVVNQNAQALAELEKELSSNFGAISSVLNDILSNLDP
PEAEVQIDRLILGRLMALAAFVTAQAIRAAEIRASANLAATKMRECVAGQSKLWGFCGEG
WHLMSFPQSAPHGVVFLHVTLVAGQSKNFTTALAICHDGKAHIPRNGVFVSNGTHWFVTQ
EQFYEPLIITTDLVLVSGNCDDVIGIVNNTVYDPLQPELDS
SEQ ID NO: 14-(CoV2_S2_5_hbnet) mutant Spike (S) protein amino acid
sequence:
AYTNSFTRGVYYPDKVFRSSVLHSTQDLFLPFFSNVTWFHAIHVSGTNGTKRFDNPVLPF
NDGVYFASTEKSNIIRGWIFGTTLDSKTQSLLIVNNATNVVIKVCEFQFCNDPFLGVYYH
KNNKSWMESEFRVYSSANNCTFEYVSQPFLMDLEGKQGNFKNLREFVFKNIDGYFKIYSK
HTPINLVRDLPQGFSALEPLVDLPIGINITRFQTLLALHRSYLTPGDSSSGWTAGAAAYY
VGYLQPRTFLLKYNENGTITDAVDCALDPLSETKCTLKSFTVEKGIYQTSNFRVQPTESI
VRFPNITNLCPFGEVFNATRFASVYAWNRKRISNCVADYSVLYNSASFSTFKCYGVSPTK
LNDLCFTNVYADSFVIRGDEVRQIAPGQTGKIADYNYKLPDDFTGCVIAWNSNNLDSKVG
GNYNYLYRLFRKSNLKPFERDISTEIYQAGSTPCNGVEGFNCYFPLQSYGFQPTNGVGYQ
PYRVVVLSFELLHAPATVCGPKKSTNLVKNKCVNFNFNGLTGTGVLTESNKKFLPFQQFG
RDIADTTDAVRDPQTLEILDITPCSFGGVSVITPGTNTSNQVAVLYQGVNCTEVPVAIHA
DQLTPTWRVYSTGSNVFQTRAGCLIGAEHVNNSYECDIPIGAGICASYQTQTNSPGSASS
VASQSIIAYQISTGSWNSVDNSNDAIAIATNFTISVTTEILPVSMTKTWVDCTLYICGGS
TECSNLLAQYGSFCTELNRMLTGIAVEQDKNTWEVFATVRTIFHTPSIKDFGGFNFSQIL
PDPSKPSKRSFIEDLLFNKVTLADAGFIKQYGDCLGDIAARDSSCAQKANGLNILSSLLT
DELIAEFTSALLAGTITAGWTFLAGAALNIPWAVQMAWRFAGIGVTENVLAKNQKLIANQ
FNSAIGKIQDSLSSTASALGKLQDVVNQNAQALAQLEKTLSSNFGAISSVLNDILSNLDP
PEAEVQIDRLILGRLMALAAFVTAQAIRAAEIRASANLAATKMRECVAGQSKLWGFCGEG
FHLMSFPQSAPHGWFLHVTYVAGQYKNFTTALAICHDGKAHIPRNGVFVSNGTHWFVTQ
ENFYEPLIITTDLVLVSGNCDDVIGIVNNTVYDPLQPELDS
SEQ ID NO: 15-(CoV2_S_1_pross) mutant Spike (S) protein amino acid sequence:
AYTNSFRRGVYYPDKVFRSNVLHLTQDLFLPFFSNVTWFHAINVSGTNGTKRFDNPVLPF
NDGVYFAATEKSNIIRGWIFGSTLDSKTQTLLIVNNGTNVVIRVCEFNFCEDPFLGVYYH
KNNKSWLESGFHVYDSANNCTFEYVSHPFIMDLEGDSGNFKHLREFIFKNIDGWFHIYSS
HTPINLVTDLPAGFSALELLVDLPIGINITRFQILLALHRSYLTPGDSRSGWTRGAAVYY
VGYLQPRTFLLKYNENGTITDAVDCALDPLAETKCTLKSFTVEKGIYQTSNFRVRPTESI
VRFPNITNLCDFSEVFNATRFASVYAWNRKRISNCVADYSSLYNSTSFSTFHCYGVDPKK
LNDLCFTNVYADSFVIRGDEVRQLAPGQTGEIADYNYKLPDDFTGCVIAWNSNNLDARKS
GNYNYLYRLFRNGNLRPFERDISTEIYQLGDTPCNGVEGFNCYFPLQSYDFQPTNGSEYQ
PYRVVVLSFELLHGPATVCGPKKNTSLVKNKCVNFNFYGYTGTGVLTESNKKFLSFQLFG
RDSSDTTDAVRDPQTNEIYDITPCSFGGVSVITPGTDTSNEVAVLYQNVNCSEVPVAIHA
NQLTPTWRRYSTGSNIFQTRAGCLIGAEFVNNSYECDIPIGAGICASYDTQTNSPGSASS
VASQSIIAYTMSLGSENSVSYSNDSIAIPTNFTISVTTEIIPVSMPKVSVDCKMYICGDH
SECSNLLLQYGSFCTQLNRALHEIAEEQDKNMLEVFAQVRQIYKTPPIKDFGGFNFSLIL
PDPSKSSKRSAIEDLLFNKVKLADAGFIEGYGDCLGDIAARDLICAQKFNGLTVLPPLLT
DEMIAAYTAALLAGTITAGWTFGAGSALQIPFAMQMAYRFNGIGVTQNVLYENQKLIANQ
FNKAIGAIQEGLDETAEALGKLQDVVNQNAQALNTLVKQLSSNFGAISSSLNDILSRLDP
PEAEVQIDRLINGRLQALNTFVTQLLIRAAEIRASAELAAEKMNECVLGQSKRVNFCGNG
YHLMSFPQAAPHGVVFLHVTYVPTSHRNFTTAPAICHNGKAHFPRDGVFVSNGTHWFVTQ
RNFYEPQPITTDNTFVSGDCDVVIGIVNNTVYDPLQPELDS
SEQ ID NO: 16-(CoV2_S_2_pross) mutant Spike (S) protein amino acid sequence:
AYTNSFTRGVYYPDKVFRSNVLHLTQDLFLPFFSNVTWFHAINVSGTNGTKRFDNPVLPF
NDGVYFASTEKSNIIRGWIFGTTLDSKTQSLLIVNNGTNVVIRVCEFNFCENPFLGVYYH
KNNKSWMESGFHVYTSANNCTFEYVSHPFIMDLEGDSGNFKHLREFIFKNIDGWFHIYSK
HTPINLVTDLPAGFSALELLVDLPIGINITRFQILLALHRSYLTPGDSRSGWTRGAAVYY
VGYLQPRTFLLKYNENGTITDAVDCALDPLAETKCTLKSFTVEKGIYQTSNFRVQPTESI
VRFPNITNLCDFSEVFNATRFASVYAWNRKRISNCVADYSSLYNSTSFSTFKCYGVDPTK
LNDLCFTNVYADSFVIRGDEVRQLAPGQTGEIADYNYKLPDDFTGCVIAWNSNNLDARKS
GNYNYLYRLFRHGNLRPFERDISTEIYQAGDTPCNGVEGFNCYFPLQSYDFQPTNGSSYQ
PYRVVVLSFELLHGPATVCGPKKNTSLVKNKCVNFNFYGYTGTGVLTESNKKFLSFQLFG
RDSADTTDAVRDPQTNEIYDITPCSFGGVSVITPGTNTSNQVAVLYQNVNCTEVPVAIHA
NQLTPTWRRYSTGSNIFQTRAGCLIGAEYVNNSYECDIPIGAGICASYDTQTNSPGSASS
VASQSIIAYTMSLGSENSVSYSNDSIAIPTNFTISVTTEIIPVSMQKVSVDCKMYICGDH
SECSNLLLQYGSFCTQLNRALHEIAEEQDKNTLEVFAQVKQIYKTPPIKDFGGFNFSLIL
PDPSKSSKRSAIEDLLFNKVKLADAGFIEGYGDCLGDIAARDLICAQKFNGLTVLPPLLT
DEMIAAYTAALLAGTITAGWTFGAGSALQIPFAMQMAYRFNGIGVTQNVLYENQKLIANQ
FNKAIGAIQEGLDATAEALGKLQDVVNQNAQALNTLVKQLSSNFGAISSVLNDILSRLDP
PEAEVQIDRLINGRLQALNTFVTQLLIRAAEIRASAELAAEKMSECVLGQSKRVDFCGNG
YHLMSFPQAAPHGVVFLHVTYVPTDYRNFTTAPAICHNGKAHFPREGVFVSNGTHWFVTQ
RNFYEPQIITTDNTFVSGDCDVVIGIVNNTVYDPLQPELDS
SEQ ID NO: 17-(CoV2_S_3_5_pross) mutant Spike (S) protein amino acid
sequence:
AYTNSFTRGVYYPDKVFRSNVLHLTQDLFLPFFSNVTWFHAIHVSGTNGTKRFDNPVLPF
NDGVYFASTEKSNIIRGWIFGTTLDSKTQSLLIVNNGTNVVIRVCEFQFCEDPFLGVYYH
KNNKSWMESGFHVYSSANNCTFEYVSQPFLMDLEGDSGNFKNLREFIFKNIDGWFHIYSK
HTPINLVRDLPEGFSALEPLVDLPIGINITRFQILLALHRSYLTPGDSRSGWTRGAAAYY
VGYLQPRTFLLKYNENGTITDAVDCALDPLSETKCTLKSFTVEKGIYQTSNFRVQPTESI
VRFPNITNLCDFDEVFNATRFASVYAWNRKRISNCVADYSVLYNSTSFSTFWCYGVSPTK
LNDLCFTNVYADSFVIRGDEVRQLAPGQTGEIADYNYKLPDDFTGCVIAWNSNNLDARVS
GNYNYLYRLFRKGNLRPFERDISTEIYQAGSTPCNGVEGFNCYFPLQSYDFQPTNGSHYQ
PYRVVVLSFELLHGPATVCGPKKNTNLVKNKCVNFNFYGYTGTGVLTESNKKFLSFQQFG
RDSADTTDAVRDPQTNEIYDITPCSFGGVSVITPGTNTSNQVAVLYQGVNCTEVPVAIHA
DQLTPTWRRYSTGSNVFQTRAGCLIGAEYVNNSYECDIPIGAGICASYDTQTNSPGSASS
VASQSIIAYTMSLGEENSVSYSNNSIAIPTNFTISVTTEIIPVSMQKVSVDCTMYICGDH
EECSNLLLQYGSFCTQLNRALHEIAVEQDKNTQEVFAQVKQIYKTPPIKDFGGFNFSQIL
PDPSKSSKRSAIEDLLFNKVTLADAGFIKGYGDCLGDIAARDLICAQKFNGLTVLPPLLT
DEMIAAYTSALLAGTITAGWTFGAGAALQIPFAMQMAYRFNGIGVTQNVLYENQKLIANQ
FNKAIGAIQDGLDSTASALGKLQDVVNQNAQALNTLVKQLSSNFGAISSVLNDILSRLDP
PEAEVQIDRLINGRLQALNTYVTQQLIRAAEIRASANLAAEKMSECVLGQSKRVDFCGKG
YHLMSFPQAAPHGVVFLHVTYVPTQHKNFTTAPAICHNGKAHFPREGVFVSNGTHWFVTQ
RNFYEPQPITTDNTFVSGDCDVVIGIVNNTVYDPLQPELDS
SEQ ID NO: 18-(CoV2_S_5_pross) mutant Spike (S) protein amino acid sequence:
AYTNSFTRGVYYPDKVFRSNVLHLTQDLFLPFFSNVTWFHAIHVSGTNGTKRFDNPVLPF
NDGVYFASTEKSNIIRGWIFGTTLDSKTQSLLIVNNATNVVIKVCEFQFCEDPFLGVYYH
KNNKSWMESEFHVYSSANNCTFEYVSQPFLMDLEGKQGNFKNLREFVFKNIDGYFKIYSK
HTPINLVRDLPEGFSALEPLVDLPIGINITRFQILLALHRSYLTPGDSRSGWTAGAAAYY
VGYLQPRTFLLKYNENGTITDAVDCALDPLSETKCTLKSFTVEKGIYQTSNFRVQPTESI
VRFPNITNLCDFDEVFNATRFASVYAWNRKRISNCVADYSVLYNSTSFSTFKCYGVSPTK
LNDLCFTNVYADSFVIRGDEVRQLAPGQTGEIADYNYKLPDDFTGCVIAWNSNNLDARVS
GNYNYLYRLFRKGNLKPFERDISTEIYQAGSTPCNGVEGFNCYFPLQSYNFQPTNGSGYQ
PYRVVVLSFELLHGPATVCGPKKNTNLVKNKCVNFNFNGYTGTGVLTESNKKFLSFQQFG
RDSADTTDAVRDPQTNEILDITPCSFGGVSVITPGTNTSNQVAVLYQNVNCTEVPVAIHA
DQLTPTWRRYSTGSNVFQTRAGCLIGAEHVNNSYECDIPIGAGICASYDTQTNSPGSASS
VASQSIIAYTMSLGAENSVAYSNNSIAIPTNFTISVTTEIIPVSMQKTSVDCTMYICGDS
TECSNLLLQYGSFCTQLNRALHEIAVEQDKNTQEVFAQVKQIYKTPPIKDFGGFNFSQIL
PDPSKSSKRSFIEDLLFNKVTLADAGFIKGYGDCLGDIAARDLICAQKFNGLTVLPPLLT
DEMIAAYTSALLAGTITAGWTFGAGAALQIPFAMQMAYRFNGIGVTQNVLYENQKLIANQ
FNKAIGKIQDGLSSTASALGKLQDVVNQNAQALNTLVKQLSSNFGAISSVLNDILSRLDP
PEAEVQIDRLINGRLQALNTYVTQQLIRAAEIRASANLAAEKMSECVLGQSKRVDFCGKG
YHLMSFPQSAPHGVVFLHVTYVPTQFKNFTTAPAICHDGKAHFPREGVFVSNGTHWFVTQ
RNFYEPQPITTDNTFVSGNCDVVIGIVNNTVYDPLQPELDS
SEQ ID NO: 19-(CoV2_S_6_pross) mutant Spike (S) protein amino acid sequence:
AYTNSFTRGVYYPDKVFRSNVLHLTQDLFLPFFSNVTWFHAIHVSGTNGTKRFDNPVLPF
NDGVYFASTEKSNIIRGWIFGTTLDSKTQSLLIVNNATNVVIKVCEFQFCEDPFLGVYYH
KNNKSWMESEFHVYSSANNCTFEYVSQPFLMDLEGKQGNFKNLREFVFKNIDGYFKIYSK
HTPINLVRDLPQGFSALEPLVDLPIGINITRFQILLALHRSYLTPGDSSSGWTAGAAAYY
VGYLQPRTFLLKYNENGTITDAVDCALDPLSETKCTLKSFTVEKGIYQTSNFRVQPTESI
VRFPNITNLCDFSEVFNATRFASVYAWNRKRISNCVADYSVLYNSTSFSTFKCYGVSPTK
LNDLCFTNVYADSFVIRGDEVRQLAPGQTGKIADYNYKLPDDFTGCVIAWNSNNLDSRVG
GNYNYLYRLFRKGNLKPFERDISTEIYQAGSTPCNGVEGFNCYFPLQSYGFQPTNGVGYQ
PYRVVVLSFELLHAPATVCGPKKNTNLVKNKCVNFNFNGLTGTGVLTESNKKFLSFQQFG
RDSADTTDAVRDPQTNEILDITPCSFGGVSVITPGTNTSNQVAVLYQGVNCTEVPVAIHA
DQLTPTWRVYSTGSNVFQTRAGCLIGAEHVNNSYECDIPIGAGICASYQTQTNSPGSASS
VASQSIIAYTMSLGAENSVAYSNNSIAIPTNFTISVTTEIIPVSMPKTSVDCTMYICGDS
TECSNLLLQYGSFCTQLNRALTEIAVEQDKNTQEVFAQVKQIYKTPPIKDFGGFNFSQIL
PDPSKSSKRSFIEDLLFNKVTLADAGFIKGYGDCLGDIAARDLICAQKFNGLTVLPPLLT
DEMIAAYTSALLAGTITAGWTFGAGAALQIPFAMQMAYRFNGIGVTQNVLYENQKLIANQ
FNKAIGKIQDGLSSTASALGKLQDVVNQNAQALNTLVKQLSSNFGAISSVLNDILSRLDP
PEAEVQIDRLINGRLQSLQTYVTQQLIRAAEIRASANLAAEKMSECVLGQSKRVDFCGKG
YHLMSFPQSAPHGVVFLHVTYVPTQYKNFTTAPAICHDGKAHFPREGVFVSNGTHWFVTQ
RNFYEPQIITTDNTFVSGNCDVVIGIVNNTVYDPLQPELDS
SEQ ID NO: 20-(CoV2_S2_NTD_0_5_pross) mutant Spike (S) protein amino acid
sequence:
AYTNSFRRGVYYPDKIFRSNVLHLTQDLFLPFFSNVTWFHAINVSGTNGTKRFDNPVLPF
NDGVYFAATEKNNIIRGWIFGSTLDSKTQTLLIVNNGTNIVIRVCEFNFCENPFLGVYYH
KNNKSWSESGFHVYDSANNCTFEYVSHPFIMDLEGDSGNFKHLREFIFKNIDGWFLIYSS
HTPINLVTDLPAGFSALELLVDLPIGINITRFQILLALHRSYLTPGDSRSGWTRGAAVYY
VGYLQPRTFLLKYDENGTITDAVDCALDPLAETKCTLKSFTVEKGIYQTSNFRVRPTESI
VRFPNITNLCPFGEVFNATRFASVYAWNRKRISNCVADYSVLYNSASFSTFKCYGVSPTK
LNDLCFTNVYADSFVIRGDEVRQIAPGQTGKIADYNYKLPDDFTGCVIAWNSNNLDSKVG
GNYNYLYRLFRKSNLKPFERDISTEIYQAGSTPCNGVEGFNCYFPLQSYGFQPTNGVGYQ
PYRVVVLSFELLHAPATVCGPKKSTNLVKNKCVNFNFNGLTGTGVLTESNKKFLPFQQFG
RDIADTTDAVRDPQTLEILDITPCSFGGVSVITPGTDTSNEVAVLYQNVNCSEVPTAIHA
NQLTPTWRRYSTGSNIFQTRAGCLIGAEEVNNSYECDIPIGAGICASYDTQTNSRGSASS
VASQSIIAYTMSLGSENSVSYSNTSIAIPTNFTISVTTEIIPVSMPKVSVDCKMYICGDH
SECKNLLLQYGSFCTQLNRALHEIAEEQDKNLREVFAQVRQIYKTPPIKDFGGFNFSLIL
PDPSKPSKRSAIEDLLFNKVKLADAGFIEGYGDCLGDIAARDLICAQKFNGLTVLPPLLT
DEMIAAYTAALLAGTITAGWTFGAGSALQIPFAMQMAYRFNGIGVTQNVLYENQKLIANQ
FNKAIGAIQEGLDETAEALGKLQDVVNQNAEALNTLVKQLSSNFGAISSSLNDILSRLDP
PEAEVQIDRLINGRLQALNTFVTQLLIRAAEIRASAELAAEKMNECVLGQSKRVNFCGNG
YHLMSFPQAAPHGVVFLHVTYVPTDHRNFTTAPAICHNGKAHFPRDGVFVSNGTHWFVTQ
RNFYEPQPITTDNTFVSGDCDVVIGIVNNTVYDPLKPELDS
SEQ ID NO: 21-(CoV2_S2_NTD_2_pross) mutant Spike (S) protein amino acid
sequence:
AYTNSFTRGVYYPDKVFRSNVLHLTQDLFLPFFSNVTWFHAINVSGTNGTKRFDNPVLPF
NDGVYFASTEKSNIIRGWIFGTTLDSKTQSLLIVNNGTNVVIRVCEFNFCENPFLGVYYH
KNNKSWMESGFHVYTSANNCTFEYVSHPFIMDLEGDSGNFKHLREFIFKNIDGWFKIYSK
HTPINLVTDLPAGFSALELLVDLPIGINITRFQILLALHRSYLTPGDSRSGWTRGAAVYY
VGYLQPRTFLLKYNENGTITDAVDCALDPLAETKCTLKSFTVEKGIYQTSNFRVQPTESI
VRFPNITNLCPFGEVFNATRFASVYAWNRKRISNCVADYSVLYNSASFSTFKCYGVSPTK
LNDLCFTNVYADSFVIRGDEVRQIAPGQTGKIADYNYKLPDDFTGCVIAWNSNNLDSKVG
GNYNYLYRLFRKSNLKPFERDISTEIYQAGSTPCNGVEGFNCYFPLQSYGFQPTNGVGYQ
PYRVVVLSFELLHAPATVCGPKKSTNLVKNKCVNFNFNGLTGTGVLTESNKKFLPFQQFG
RDIADTTDAVRDPQTLEILDITPCSFGGVSVITPGTNTSNQVAVLYQNVNCTEVPVAIHA
NQLTPTWRRYSTGSNIFQTRAGCLIGAEHVNNSYECDIPIGAGICASYDTQTNSPGSASS
VASQSIIAYTMSLGSENSVSYSNDSIAIPTNFTISVTTEIIPVSMQKVSVDCKMYICGDH
SECSNLLLQYGSFCTQLNRALHEIAEEQDKNTLEVFAQVKQIYKTPPIKDFGGFNFSLIL
PDPSKPSKRSAIEDLLFNKVKLADAGFIEGYGDCLGDIAARDLICAQKFNGLTVLPPLLT
DEMIAAYTAALLAGTITAGWTFGAGSALVIPFAMQMAYRFNGIGVTQNVLYENQKLIANQ
FNKAIGAIQEGLDATAEALGKLQDVVNQNAQALNTLVKQLSSNFGAISSVLNDILSRLDP
PEAEVQIDRLINGRLQALNTFVTQLLIRAAEIRASAELAAEKMSECVLGQSKRVDFCGNG
YHLMSFPQAAPHGVVFLHVTYVPTDYRNFTTAPAICHNGKAHFPREGVFVSNGTHWFVTQ
RNFYEPQPITTDNTFVSGDCDVVIGIVNNTVYDPLQPELDS
SEQ ID NO: 22-(CoV2_S2_NTD_3_pross) mutant Spike (S) protein amino acid
sequence:
AYTNSFTRGVYYPDKVFRSNVLHLTQDLFLPFFSNVTWFHAIHVSGTNGTKRFDNPVLPF
NDGVYFASTEKSNIIRGWIFGTTLDSKTQSLLIVNNGTNVVIRVCEFNFCEDPFLGVYYH
KNNKSWMESGFHVYSSANNCTFEYVSQPFLMDLEGDSGNFKNLREFIFKNIDGWFHIYSK
HTPINLVRDLPEGFSALEPLVDLPIGINITRFQILLALHRSYLTPGDSRSGWTRGAAVYY
VGYLQPRTFLLKYNENGTITDAVDCALDPLAETKCTLKSFTVEKGIYQTSNFRVQPTESI
VRFPNITNLCPFGEVFNATRFASVYAWNRKRISNCVADYSVLYNSASFSTFKCYGVSPTK
LNDLCFTNVYADSFVIRGDEVRQIAPGQTGKIADYNYKLPDDFTGCVIAWNSNNLDSKVG
GNYNYLYRLFRKSNLKPFERDISTEIYQAGSTPCNGVEGFNCYFPLQSYGFQPTNGVGYQ
PYRVVVLSFELLHAPATVCGPKKSTNLVKNKCVNFNFNGLTGTGVLTESNKKFLPFQQFG
RDIADTTDAVRDPQTLEILDITPCSFGGVSVITPGTNTSNQVAVLYQGVNCTEVPVAIHA
DQLTPTWRRYSTGSNIFQTRAGCLIGAEYVNNSYECDIPIGAGICASYDTQTNSPGSASS
VASQSIIAYTMSLGEENSVSYDNNSIAIPTNFTISVTTEIIPVSMQKVSVDCTMYICGDH
SECSNLLLQYGSFCTQLNRALHEIAVEQDKNTLEVFAQVKQIYKTPPIKDFGGFNFSQIL
PDPSKPSKRSAIEDLLFNKVTLADAGFIKGYGDCLGDIAARDLICAQKFNGLTVLPPLLT
DEMIAAYTSALLAGTITAGWTFGAGSALQIPFAMQMAYRFNGIGVTQNVLYENQKLIANQ
FNKAIGAIQDGLDSTASALGKLQDVVNQNAQALNTLVKQLSSNFGAISSVLNDILSRLDP
PEAEVQIDRLINGRLQALNTYVTQLLIRAAEIRASANLAAEKMSECVLGQSKRVDFCGKG
YHLMSFPQAAPHGVVFLHVTYVPTQYKNFTTAPAICHNGKAHFPREGVFVSNGTHWFVTQ
RNFYEPQIITTDNTFVSGDCDVVIGIVNNTVYDPLQPELDS
SEQ ID NO: 23-(CoV2_S2_NTD_5_pross) mutant Spike (S) protein amino acid
sequence:
AYTNSFTRGVYYPDKVFRSNVLHLTQDLFLPFFSNVTWFHAIHVSGTNGTKRFDNPVLPF
NDGVYFASTEKSNIIRGWIFGTTLDSKTQSLLIVNNATNVVIKVCEFQFCEDPFLGVYYH
KNNKSWMESEFHVYSSANNCTFEYVSQPFLMDLEGKQGNFKNLREFVFKNIDGYFHIYSK
HTPINLVRDLPEGFSALEPLVDLPIGINITRFQILLALHRSYLTPGDSRSGWTAGAAAYY
VGYLQPRTFLLKYNENGTITDAVDCALDPLSETKCTLKSFTVEKGIYQTSNFRVQPTESI
VRFPNITNLCPFGEVFNATRFASVYAWNRKRISNCVADYSVLYNSASFSTFKCYGVSPTK
LNDLCFTNVYADSFVIRGDEVRQIAPGQTGKIADYNYKLPDDFTGCVIAWNSNNLDSKVG
GNYNYLYRLFRKSNLKPFERDISTEIYQAGSTPCNGVEGFNCYFPLQSYGFQPTNGVGYQ
PYRVVVLSFELLHAPATVCGPKKSTNLVKNKCVNFNFNGLTGTGVLTESNKKFLPFQQFG
RDIADTTDAVRDPQTLEILDITPCSFGGVSVITPGTNTSNQVAVLYQGVNCTEVPVAIHA
DQLTPTWRRYSTGSNVFQTRAGCLIGAEYVNNSYECDIPIGAGICASYDTQTNSPGSASS
VASQSIIAYTMSLGAENSVAYSNNSIAIPTNFTISVTTEIIPVSMQKTSVDCTMYICGDS
TECSNLLLQYGSFCTQLNRALHEIAVEQDKNTQEVFAQVKQIYKTPPIKDFGGFNFSQIL
PDPSKPSKRSFIEDLLFNKVTLADAGFIKGYGDCLGDIAARDLICAQKFNGLTVLPPLLT
DEMIAAYTSALLAGTITAGWTFGAGAALQIPFAMQMAYRFNGIGVTQNVLYENQKLIANQ
FNKAIGKIQDGLSSTASALGKLQDVVNQNAQALNTLVKQLSSNFGAISSVLNDILSRLDP
PEAEVQIDRLINGRLQALNTYVTQQLIRAAEIRASANLAAEKMSECVLGQSKRVDFCGKG
YHLMSFPQSAPHGVVFLHVTYVPTQYKNFTTAPAICHDGKAHFPREGVFVSNGTHWFVTQ
RNFYEPQPITTDNTFVSGNCDVVIGIVNNTVYDPLQPELDS
SEQ ID NO: 24-(CoV2_S2_NTD_6_pross) mutant Spike (S) protein amino acid
sequence:
AYTNSFTRGVYYPDKVFRSNVLHLTQDLFLPFFSNVTWFHAIHVSGTNGTKRFDNPVLPF
NDGVYFASTEKSNIIRGWIFGTTLDSKTQSLLIVNNATNWIKVCEFQFCEDPFLGVYYH
KNNKSWMESEFHVYSSANNCTFEYVSQPFLMDLEGKQGNFKNLREFVFKNIDGYFKIYSK
HTPINLVRDLPQGFSALEPLVDLPIGINITRFQILLALHRSYLTPGDSSSGWTAGAAAYY
VGYLQPRTFLLKYNENGTITDAVDCALDPLSETKCTLKSFTVEKGIYQTSNFRVQPTESI
VRFPNITNLCPFGEVFNATRFASVYAWNRKRISNCVADYSVLYNSASFSTFKCYGVSPTK
LNDLCFTNVYADSFVIRGDEVRQIAPGQTGKIADYNYKLPDDFTGCVIAWNSNNLDSKVG
GNYNYLYRLFRKSNLKPFERDISTEIYQAGSTPCNGVEGFNCYFPLQSYGFQPTNGVGYQ
PYRVVVLSFELLHAPATVCGPKKSTNLVKNKCVNFNFNGLTGTGVLTESNKKFLPFQQFG
RDIADTTDAVRDPQTLEILDITPCSFGGVSVITPGTNTSNQVAVLYQGVNCTEVPVAIHA
DQLTPTWRVYSTGSNVFQTRAGCLIGAEHVNNSYECDIPIGAGICASYQTQTNSPGSASS
VASQSIIAYTMSLGAENSVAYSNNSIAIPTNFTISVTTEIIPVSMPKTSVDCTMYICGDS
TECSNLLLQYGSFCTQLNRALTEIAVEQDKNTQEVFAQVKQIYKTPPIKDFGGFNFSQIL
PDPSKPSKRSFIEDLLFNKVTLADAGFIKGYGDCLGDIAARDLICAQKFNGLTVLPPLLT
DEMIAAYTSALLAGTITAGWTFGAGAALQIPFAMQMAYRFNGIGVTQNVLYENQKLIANQ
FNKAIGKIQDGLSSTASALGKLQDVVNQNAQALNTLVKQLSSNFGAISSVLNDILSRLDP
PEAEVQIDRLINGRLQSLQTYVTQQLIRAAEIRASANLAAEKMSECVLGQSKRVDFCGKG
YHLMSFPQSAPHGVVFLHVTYVPTQHKNFTTAPAICHDGKAHFPREGVFVSNGTHWFVTQ
RNFYEPQIITTDNTFVSGNCDVVIGIVNNTVYDPLQPELDS
SEQ ID NO: 25-(CoV2_S2_1_pross) mutant Spike (S) protein amino acid
sequence:
AYTNSFTRGVYYPDKVFRSSVLHSTQDLFLPFFSNVTWFHAIHVSGTNGTKRFDNPVLPF
NDGVYFASTEKSNIIRGWIFGTTLDSKTQSLLIVNNATNVVIKVCEFQFCNDPFLGVYYH
KNNKSWMESEFRVYSSANNCTFEYVSQPFLMDLEGKQGNFKNLREFVFKNIDGYFKIYSK
HTPINLVRDLPQGFSALEPLVDLPIGINITRFQTLLALHRSYLTPGDSSSGWTAGAAAYY
VGYLQPRTFLLKYNENGTITDAVDCALDPLSETKCTLKSFTVEKGIYQTSNFRVQPTESI
VRFPNITNLCPFGEVFNATRFASVYAWNRKRISNCVADYSVLYNSASFSTFKCYGVSPTK
LNDLCFTNVYADSFVIRGDEVRQIAPGQTGKIADYNYKLPDDFTGCVIAWNSNNLDSKVG
GNYNYLYRLFRKSNLKPFERDISTEIYQAGSTPCNGVEGFNCYFPLQSYGFQPTNGVGYQ
PYRVVVLSFELLHAPATVCGPKKSTNLVKNKCVNFNFNGLTGTGVLTESNKKFLPFQQFG
RDIADTTDAVRDPQTLEILDITPCSFGGVSVITPGTNTSNQVAVLYQGVNCTEVPVAIHA
DQLTPTWRVYSTGSNVFQTRAGCLIGAEHVNNSYECDIPIGAGICASYQTQTNSPGSASS
VASQSIIAYTMSLGSENSVSYSNDSIAIPTNFTISVTTEIIPVSMPKVSVDCKMYICGDH
SECSNLLLQYGSFCTQLNRALHEIAEEQDKNMREVFAQVRQIYKTPPIKDFGGFNFSLIL
PDPSKPSKRSAIEDLLFNKVKLADAGFIEGYGDCLGDIAARDLICAQKFNGLTVLPPLLT
DEMIAAYTAALLAGTITAGWTFGAGSALQIPFAMQMAYRFNGIGVTQNVLYENQKLIANQ
FNKAIGAIQEGLDETAEALGKLQDVVNQNAQALNTLVKQLSSNFGAISSSLNDILSRLDP
PEAEVQIDRLINGRLQALNTFVTQLLIRAAEIRASAELAAEKMNECVLGQSKRVNFCGNG
YHLMSFPQAAPHGVVFLHVTYVPTEYRNFTTAPAICHNGKAHFPRDGVFVSNGTHWFVTQ
RNFYEPQIITTDNTFVSGDCDVVIGIVNNTVYDPLQPELDS
SEQ ID NO: 26-(CoV2_S2_2_pross) mutant Spike (S) protein amino acid
sequence:
AYTNSFTRGVYYPDKVFRSSVLHSTQDLFLPFFSNVTWFHAIHVSGTNGTKRFDNPVLPF
NDGVYFASTEKSNIIRGWIFGTTLDSKTQSLLIVNNATNVVIKVCEFQFCNDPFLGVYYH
KNNKSWMESEFRVYSSANNCTFEYVSQPFLMDLEGKQGNFKNLREFVFKNIDGYFKIYSK
HTPINLVRDLPQGFSALEPLVDLPIGINITRFQTLLALHRSYLTPGDSSSGWTAGAAAYY
VGYLQPRTFLLKYNENGTITDAVDCALDPLSETKCTLKSFTVEKGIYQTSNFRVQPTESI
VRFPNITNLCPFGEVFNATRFASVYAWNRKRISNCVADYSVLYNSASFSTFKCYGVSPTK
LNDLCFTNVYADSFVIRGDEVRQIAPGQTGKIADYNYKLPDDFTGCVIAWNSNNLDSKVG
GNYNYLYRLFRKSNLKPFERDISTEIYQAGSTPCNGVEGFNCYFPLQSYGFQPTNGVGYQ
PYRVVVLSFELLHAPATVCGPKKSTNLVKNKCVNFNFNGLTGTGVLTESNKKFLPFQQFG
RDIADTTDAVRDPQTLEILDITPCSFGGVSVITPGTNTSNQVAVLYQGVNCTEVPVAIHA
DQLTPTWRVYSTGSNVFQTRAGCLIGAEHVNNSYECDIPIGAGICASYQTQTNSPGSASS
VASQSIIAYTMSLGSENSVSYSNDSIAIPTNFTISVTTEIIPVSMQKVSVDCKMYICGDH
SECSNLLLQYGSFCTQLNRALHEIAEEQDKNTLEVFAQVKQIYKTPPIKDFGGFNFSLIL
PDPSKPSKRSAIEDLLFNKVKLADAGFIEGYGDCLGDIAARDLICAQKFNGLTVLPPLLT
DEMIAAYTAALLAGTITAGWTFGAGSALQIPFAMQMAYRFNGIGVTQNVLYENQKLIANQ
FNKAIGAIQEGLDATAEALGKLQDVVNQNAQALNTLVKQLSSNFGAISSVLNDILSRLDP
PEAEVQIDRLINGRLQALNTFVTQLLIRAAEIRASAELAAEKMSECVLGQSKRVDFCGNG
YHLMSFPQAAPHGVVFLHVTYVPTDYRNFTTAPAICHNGKAHFPREGVFVSNGTHWFVTQ
RNFYEPQIITTDNTFVSGDCDVVIGIVNNTVYDPLQPELDS
SEQ ID NO: 27-(CoV2_S2_3_pross) mutant Spike (S) protein amino acid
sequence:
AYTNSFTRGVYYPDKVFRSSVLHSTQDLFLPFFSNVTWFHAIHVSGTNGTKRFDNPVLPF
NDGVYFASTEKSNIIRGWIFGTTLDSKTQSLLIVNNATVVWIKVCEFQFCNDPFLGVYYH
KNNKSWMESEFRVYSSANNCTFEYVSQPFLMDLEGKQGNFKNLREFVFKNIDGYFKIYSK
HTPINLVRDLPQGFSALEPLVDLPIGINITRFQTLLALHRSYLTPGDSSSGWTAGAAAYY
VGYLQPRTFLLKYNENGTITDAVDCALDPLSETKCTLKSFTVEKGIYQTSNFRVQPTESI
VRFPNITNLCPFGEVFNATRFASVYAWNRKRISNCVADYSVLYNSASFSTFKCYGVSPTK
LNDLCFTNVYADSFVIRGDEVRQIAPGQTGKIADYNYKLPDDFTGCVIAWNSNNLDSKVG
GNYNYLYRLFRKSNLKPFERDISTEIYQAGSTPCNGVEGFNCYFPLQSYGFQPTNGVGYQ
PYRVVVLSFELLHAPATVCGPKKSTNLVKNKCVNFNFNGLTGTGVLTESNKKFLPFQQFG
RDIADTTDAVRDPQTLEILDITPCSFGGVSVITPGTNTSNQVAVLYQGVNCTEVPVAIHA
DQLTPTWRVYSTGSNVFQTRAGCLIGAEHVNNSYECDIPIGAGICASYQTQTNSPGSASS
VASQSIIAYTMSLGEENSVSYDNNSIAIPTNFTISVTTEIIPVSMQKVSVDCTMYICGDH
SECSNLLLQYGSFCTQLNRALHEIAVEQDKNTLEVFAQVKQIYKTPPIKDFGGFNFSQIL
PDPSKPSKRSAIEDLLFNKVTLADAGFIKGYGDCLGDIAARDLICAQKFNGLTVLPPLLT
DEMIAAYTSALLAGTITAGWTFGAGSALQIPFAMQMAYRFNGIGVTQNVLYENQKLIANQ
FNKAIGAIQDGLDSTASALGKLQDVVNQNAQALNTLVKQLSSNFGAISSVLNDILSRLDP
PEAEVQIDRLINGRLQALNTYVTQLLIRAAEIRASANLAAEKMSECVLGQSKRVDFCGKG
YHLMSFPQAAPHGVVFLHVTYVPTQYKNFTTAPAICHNGKAHFPREGVFVSNGTHWFVTQ
RNFYEPQPITTDNTFVSGDCDVVIGIVNNTVYDPLQPELDS
SEQ ID NO: 28-(CoV2_S2_4_pross) mutant Spike (S) protein amino acid
sequence:
AYTNSFTRGVYYPDKVFRSSVLHSTQDLFLPFFSNVTWFHAIHVSGTNGTKRFDNPVLPF
NDGVYFASTEKSNIIRGWIFGTTLDSKTQSLLIVNNATNVVIKVCEFQFCNDPFLGVYYH
KNNKSWMESEFRVYSSANNCTFEYVSQPFLMDLEGKQGNFKNLREFVFKNIDGYFKIYSK
HTPINLVRDLPQGFSALEPLVDLPIGINITRFQTLLALHRSYLTPGDSSSGWTAGAAAYY
VGYLQPRTFLLKYNENGTITDAVDCALDPLSETKCTLKSFTVEKGIYQTSNFRVQPTESI
VRFPNITNLCPFGEVFNATRFASVYAWNRKRISNCVADYSVLYNSASFSTFKCYGVSPTK
LNDLCFTNVYADSFVIRGDEVRQIAPGQTGKIADYNYKLPDDFTGCVIAWNSNNLDSKVG
GNYNYLYRLFRKSNLKPFERDISTEIYQAGSTPCNGVEGFNCYFPLQSYGFQPTNGVGYQ
PYRVVVLSFELLHAPATVCGPKKSTNLVKNKCVNFNFNGLTGTGVLTESNKKFLPFQQFG
RDIADTTDAVRDPQTLEILDITPCSFGGVSVITPGTNTSNQVAVLYQGVNCTEVPVAIHA
DQLTPTWRVYSTGSNVFQTRAGCLIGAEHVNNSYECDIPIGAGICASYQTQTNSPGSASS
VASQSIIAYTMSLGEENSVAYSNNSIAIPTNFTISVTTEIIPVSMQKVSVDCTMYICGDS
EECSNLLLQYGSFCTQLNRALHEIAVEQDKNTQEVFAQVKQIYKTPPIKDFGGFNFSQIL
PDPSKPSKRSAIEDLLFNKVTLADAGFIKGYGDCLGDIAARDLICAQKFNGLTVLPPLLT
DEMIAAYTSALLAGTITAGWTFGAGAALQIPFAMQMAYRFNGIGVTQNVLYENQKLIANQ
FNKAIGKIQDGLSSTASALGKLQDVVNQNAQALNTLVKQLSSNFGAISSVLNDILSRLDP
PEAEVQIDRLINGRLQALNTYVTQQLIRAAEIRASANLAAEKMSECVLGQSKRVDFCGKG
YHLMSFPQSAPHGVVFLHVTYVPTQYKNFTTAPAICHNGKAHFPREGVFVSNGTHWFVTQ
RNFYEPQIITTDNTFVSGDCDVVIGIVNNTVYDPLQPELDS
SEQ ID NO: 29-(CoV2_S2_6_pross) mutant Spike (S) protein amino acid
sequence:
AYTNSFTRGVYYPDKVFRSSVLHSTQDLFLPFFSNVTWFHAIHVSGTNGTKRFDNPVLPF
NDGVYFASTEKSNIIRGWIFGTTLDSKTQSLLIVNNATNVVIKVCEFQFCNDPFLGVYYH
KNNKSWMESEFRVYSSANNCTFEYVSQPFLMDLEGKQGNFKNLREFVFKNIDGYFKIYSK
HTPINLVRDLPQGFSALEPLVDLPIGINITRFQTLLALHRSYLTPGDSSSGWTAGAAAYY
VGYLQPRTFLLKYNENGTITDAVDCALDPLSETKCTLKSFTVEKGIYQTSNFRVQPTESI
VRFPNITNLCPFGEVFNATRFASVYAWNRKRISNCVADYSVLYNSASFSTFKCYGVSPTK
LNDLCFTNVYADSFVIRGDEVRQIAPGQTGKIADYNYKLPDDFTGCVIAWNSNNLDSKVG
GNYNYLYRLFRKSNLKPFERDISTEIYQAGSTPCNGVEGFNCYFPLQSYGFQPTNGVGYQ
PYRVVVLSFELLHAPATVCGPKKSTNLVKNKCVNFNFNGLTGTGVLTESNKKFLPFQQFG
RDIADTTDAVRDPQTLEILDITPCSFGGVSVITPGTNTSNQVAVLYQGVNCTEVPVAIHA
DQLTPTWRVYSTGSNVFQTRAGCLIGAEHVNNSYECDIPIGAGICASYQTQTNSPGSASS
VASQSIIAYTMSLGAENSVAYSNNSIAIPTNFTISVTTEI1PVSMPKTSVDCTMYICGDS
TECSNLLLQYGSFCTQLNRALTEIAVEQDKNTQEVFAQVKQIYKTPPIKDFGGFNFSQIL
PDPSKPSKRSFIEDLLFNKVTLADAGFIKGYGDCLGDIAARDLICAQKFNGLTVLPPLLT
DEMIAAYTSALLAGTITAGWTFGAGAALQIPFAMQMAYRFNGIGVTQNVLYENQKLIANQ
FNKAIGKIQDGLSSTASALGKLQDVVNQNAQALNTLVKQLSSNFGAISSVLNDILSRLDP
PEAEVQIDRLINGRLQSLQTYVTQQLIRAAEIRASANLAAEKMSECVLGQSKRVDFCGKG
YHLMSFPQSAPHGVVFLHVTYVPTQHKNFTTAPAICHDGKAHFPREGVFVSNGTHWFVTQ
RNFYEPQIITTDNTFVSGNCDVVIGIVNNTVYDPLQPELDS
SEQ ID NO: 30-(CoV2_S2_1_hbnet_pross) mutant Spike (S) protein amino acid
sequence:
AYTNSFTRGVYYPDKVFRSSVLHSTQDLFLPFFSNVTWFHAIHVSGTNGTKRFDNPVLPF
NDGVYFASTEKSNIIRGWIFGTTLDSKTQSLLIVNNATNVVIKVCEFQFCNDPFLGVYYH
KNNKSWMESEFRVYSSANNCTFEYVSQPFLMDLEGKQGNFKNLREFVFKNIDGYFKIYSK
HTPINLVRDLPQGFSALEPLVDLPIGINITRFQTLLALHRSYLTPGDSSSGWTAGAAAYY
VGYLQPRTFLLKYNENGTITDAVDCALDPLSETKCTLKSFTVEKGIYQTSNFRVQPTESI
VRFPNITNLCPFGEVFNATRFASVYAWNRKRISNCVADYSVLYNSASFSTFKCYGVSPTK
LNDLCFTNVYADSFVIRGDEVRQIAPGQTGKIADYNYKLPDDFTGCVIAWNSNNLDSKVG
GNYNYLYRLFRKSNLKPFERDISTEIYQAGSTPCNGVEGFNCYFPLQSYGFQPTNGVGYQ
PYRVVVLSFELLHAPATVCGPKKSTNLVKNKCVNFNFNGLTGTGVLTESNKKFLPFQQFG
RDIADTTDAVRDPQTLEILDITPCSFGGVSVITPGTNTSNQVAVLYQGVNCTEVPVAIHA
DQLTPTWRVYSTGSNVFQTRAGCLIGAEHVNNSYECDIPIGAGICASYQTQTNSPGSASS
VASQSIIAYTMSLGAENSVAYSNNSIAIATNFTISVTTEILPVSMTKTSVDCTMYICGGS
TECSNLLLQYGSFCTQLNRALTEIAVEQDKNTQEVFAQVKQIYKTPPIKDFGGFNFSQIL
PDPSKPSKRSAIEDLLFNKVKLADAGFIKGYGDCLGDIAARDSICAQKFNGLTILSSLLT
DEMIAAFTSALLAGTITAGWTFGAGAALQIPFAMQMAYRFAGIGVTQNVLYENQKLIANQ
FNNAIGKIQDGLSSTASALGKLQDVVNQNAQALNTLVKQLSSNFGAISSVLNDILSNLDP
PEAEVQIDRLITGRLQSLQTYVTQQAIRAAEIRASANLAATKMSECVLGQSKLVDFCGKG
YHLMSFPQSAPHGVVFLHVTYVATQYKNFTTAPAICHDGKAHFPREGVFVSNGTHWFVTQ
RNFYEPQIITTDLTFVSGNCDVVIGIVNNTVYDPLQPELDS
SEQ ID NO: 31-(CoV2_S2_2_hbnet_pross) mutant Spike (S) protein amino acid
sequence:
AYTNSFTRGVYYPDKVFRSSVLHSTQDLFLPFFSNVTWFHAIHVSGTNGTKRFDNPVLPF
NDGVYFASTEKSNIIRGWIFGTTLDSKTQSLLIVNNATNVVIKVCEFQFCNDPFLGVYYH
KNNKSWMESEFRVYSSANNCTFEYVSQPFLMDLEGKQGNFKNLREFVFKNIDGYFKIYSK
HTPINLVRDLPQGFSALEPLVDLPIGINITRFQTLLALHRSYLTPGDSSSGWTAGAAAYY
VGYLQPRTFLLKYNENGTITDAVDCALDPLSETKCTLKSFTVEKGIYQTSNFRVQPTESI
VRFPNITNLCPFGEVFNATRFASVYAWNRKRISNCVADYSVLYNSASFSTFKCYGVSPTK
LNDLCFTNVYADSFVIRGDEVRQIAPGQTGKIADYNYKLPDDFTGCVIAWNSNNLDSKVG
GNYNYLYRLFRKSNLKPFERDISTEIYQAGSTPCNGVEGFNCYFPLQSYGFQPTNGVGYQ
PYRVVVLSFELLHAPATVCGPKKSTNLVKNKCVNFNFNGLTGTGVLTESNKKFLPFQQFG
RDIADTTDAVRDPQTLEILDITPCSFGGVSVITPGTNTSNQVAVLYQGVNCTEVPVAIHA
DQLTPTWRVYSTGSNVFQTRAGCLIGAEHVNNSYECDIPIGAGICASYQTQTNSPGSASS
VASQSIIAYTMSLGAENSVAYSNNSIAIATNFTISVTTEILPVSMTKTSVDCTMYICGGS
TECSNLLLQYGSFCTQLNRALTEIAVEQDKNTQEVFAQVKQIYKTPPIKDFGGFNFSLIL
PDPSKPSKRSAIEDLLFNKVKLADAGFIKGYGDCLGDIAARDSICAQKFNGLTILSHLLT
DEMIAAFTSALLAGTITAGWTFGAGAALQIPFAMQMAYRFAGIGVTQNVLYENQKLIANQ
FNNAIGKIQDGLSSTASALGKLQDVVNQNAQALNTLVKQLSSNFGAISSVLNDILSHLDP
PEAEVQIDRLITGRLQSLQTYVTQQLIRAAEIRASANLAATKMSECVLGQSKLVDFCGKG
YHLMSFPQSAPHGVVFLHVTYVATQYKNFTTAPAICHDGKAHFPREGVFVSNGTHWFVTQ
RNFYEPQIITTDLTFVSGNCDVVIGIVNNTVYDPLQPELDS
SEQ ID NO: 32-(CoV2_S2_3_hbnet_pross) mutant Spike (S) protein amino acid
sequence:
AYTNSFTRGVYYPDKVFRSSVLHSTQDLFLPFFSNVTWFHAIHVSGTNGTKRFDNPVLPF
NDGVYFASTEKSNIIRGWIFGTTLDSKTQSLLIVNNATNVVIKVCEFQFCNDPFLGVYYH
KNNKSWMESEFRVYSSANNCTFEYVSQPFLMDLEGKQGNFKNLREFVFKNIDGYFKIYSK
HTPINLVRDLPQGFSALEPLVDLPIGINITRFQTLLALHRSYLTPGDSSSGWTAGAAAYY
VGYLQPRTFLLKYNENGTITDAVDCALDPLSETKCTLKSFTVEKGIYQTSNFRVQPTESI
VRFPNITNLCPFGEVFNATRFASVYAWNRKRISNCVADYSVLYNSASFSTFKCYGVSPTK
LNDLCFTNVYADSFVIRGDEVRQIAPGQTGKIADYNYKLPDDFTGCVIAWNSNNLDSKVG
GNYNYLYRLFRKSNLKPFERDISTEIYQAGSTPCNGVEGFNCYFPLQSYGFQPTNGVGYQ
PYRVVVLSFELLHAPATVCGPKKSTNLVKNKCVNFNFNGLTGTGVLTESNKKFLPFQQFG
RDIADTTDAVRDPQTLEILDITPCSFGGVSVITPGTNTSNQVAVLYQGVNCTEVPVAIHA
DQLTPTWRVYSTGSNVFQTRAGCLIGAEHVNNSYECDIPIGAGICASYQTQTNSPGSASS
VASQSIIAYTMSLGAENSVAYSNNSIAIATNFTISVTTEILPVSMTKTSVDCTMYICGGS
TECSNLLLQYGSFCTQLNRALTEIAVEQDKNTQEVFAQVKQIYKTPPIKDFGGFNFSLIL
PDPSKPSKRSAIEDLLFNKVKLADAGFIKGYGDCLGDIAARDSICAQKFNGLTILSSLLT
DEMIAAFTSALLAGTITAGWTFGAGAALQIPFAMQMAYRFAGIGVTQNVLYENQKLIANQ
FNNAIGKIQDGLSSTASALGKLQDVVNQNAQALNTLVKQLSSNFGAISSVLNDILSNLDP
PEAEVQIDRLITGRLQSLQTYVTQQAIRAAEIRASANLAATKMSECVLGQSKLVDFCGKG
YHLMSFPQSAPHGVVFLHVTYVATQYKNFTTAPAICHDGKAHFPREGVFVSNGTHWFVTQ
RNFYEPQIITTDLTFVSGNCDVVIGIVNNTVYDPLQPELDS
SEQ ID NO: 33-(CoV2_S2_4_hbnet_pross) mutant Spike (S) protein amino acid
sequence:
AYTNSFTRGVYYPDKVFRSSVLHSTQDLFLPFFSNVTWFHAIHVSGTNGTKRFDNPVLPF
NDGVYFASTEKSNIIRGWIFGTTLDSKTQSLLIVNNATNVVIKVCEFQFCNDPFLGVYYH
KNNKSWMESEFRVYSSANNCTFEYVSQPFLMDLEGKQGNFKNLREFVFKNIDGYFKIYSK
HTPINLVRDLPQGFSALEPLVDLPIGINITRFQTLLALHRSYLTPGDSSSGWTAGAAAYY
VGYLQPRTFLLKYNENGTITDAVDCALDPLSETKCTLKSFTVEKGIYQTSNFRVQPTESI
VRFPNITNLCPFGEVFNATRFASVYAWNRKRISNCVADYSVLYNSASFSTFKCYGVSPTK
LNDLCFTNVYADSFVIRGDEVRQIAPGQTGKIADYNYKLPDDFTGCVIAWNSNNLDSKVG
GNYNYLYRLFRKSNLKPFERDISTEIYQAGSTPCNGVEGFNCYFPLQSYGFQPTNGVGYQ
PYRVVVLSFELLHAPATVCGPKKSTNLVKNKCVNFNFNGLTGTGVLTESNKKFLPFQQFG
RDIADTTDAVRDPQTLEILDITPCSFGGVSVITPGTNTSNQVAVLYQGVNCTEVPVAIHA
DQLTPTWRVYSTGSNVFQTRAGCLIGAEHVNNSYECDIPIGAGICASYQTQTNSPGSASS
VASQSIIAYTMSLGAENSVAYSNNSIAIATNFTISVTTEILPVSMTKTSVDCTMYICGGS
TECSNLLLQYGSFCTQLNRALTEIAVEQDKNTQEVFAQVKQIYKTPPIKDFGGFNFSLIL
PDPSKPSKRSAIEDLLFNKVKLADAGFIKGYGDCLGDIAARDSICAQKFNGLTILSHLLT
DEMIAAFTSALLAGTITAGWTFGAGAALQIPFAMQMAYRFAGIGVTQNVLYENQKLIANQ
FNNAIGKIQDGLSSTASALGKLQDVVNQNAQALNTLVKQLSSNFGAISSVLNDILSNLDP
PEAEVQIDRLITGRLQSLQTYVTQQAIRAAEIRASANLAATKMSECVLGQSKLVDFCGKG
YHLMSFPQSAPHGVVFLHVTYVATQYKNFTTAPAICHDGKAHFPREGVFVSNGTHWFVTQ
RNFYEPQIITTDLTFVSGNCDVVIGIVNNTVYDPLQPELDS
SEQ ID NO: 34-(Cov2_S2_5_hbnet_pross) mutant Spike (S) protein amino acid
sequence:
AYTNSFTRGVYYPDKVFRSSVLHSTQDLFLPFFSNVTWFHAIHVSGTNGTKRFDNPVLPF
NDGVYFASTEKSNIIRGWIFGTTLDSKTQSLLIVNNATNVVIKVCEFQFCNDPFLGVYYH
KNNKSWMESEFRVYSSANNCTFEYVSQPFLMDLEGKQGNFKNLREFVFKNIDGYFKIYSK
HTPINLVRDLPQGFSALEPLVDLPIGINITRFQTLLALHRSYLTPGDSSSGWTAGAAAYY
VGYLQPRTFLLKYNENGTITDAVDCALDPLSETKCTLKSFTVEKGIYQTSNFRVQPTESI
VRFPNITNLCPFGEVFNATRFASVYAWNRKRISNCVADYSVLYNSASFSTFKCYGVSPTK
LNDLCFTNVYADSFVIRGDEVRQIAPGQTGKIADYNYKLPDDFTGCVIAWNSNNLDSKVG
GNYNYLYRLFRKSNLKPFERDISTEIYQAGSTPCNGVEGFNCYFPLQSYGFQPTNGVGYQ
PYRVVVLSFELLHAPATVCGPKKSTNLVKNKCVNFNFNGLTGTGVLTESNKKFLPFQQFG
RDIADTTDAVRDPQTLEILDITPCSFGGVSVITPGTNTSNEVAVLYQGVNCTEVPVAIHA
DQLTPTWRVYSTGSNVFQTRAGCLIGAEHVNNSYECDIPIGAGICASYQTQTNSPGSASS
VASQSIIAYTMSLGAENSVAYSNNSIAIATNFTISVTTEILPVSMSKTSVDCTMYICGGS
TECSNLLLQYGSFCTQLNRALTEIAVEQDKNTQEVFAQVKQIYKTPPIKDFGGFNFSQIL
PDPSKPSKRSAIEDLLFNKVKLADAGFIKGYGDCLGDIAARDSICAQKFNGLTILSSLLT
DEMIAAFTSALLAGTITAGWTFGAGAALQIPFAMQMAYRFAGIGVTQNVLYENQKLIANQ
FNKAIGKIQDGLSSTASALGKLQDVVNQNAQALNTLVKQLSSNFGAISSVLNDILSNLDP
PEAEVQIDRLITGRLQSLQTYVTQQAIRAAEIRASANLAATKMSECVLGQSKLVDFCGKG
YHLMSFPQSAPHGVVFLHVTYVATQYKNFTTAPAICHDGKAHFPREGVFVSNGTHWFVTQ
RNFYEPQIITTDLTFVSGNCDVVIGIVNNTVYDPLQPELDS
SEQ ID NO: 35-(CoV_2_S_openDS1, SEQ ID NO: 4 as parent) mutant Spike (S)
protein amino acid sequence:
AYTNSFTRGVYYPDKVFRSSVLHSTQDLFLPFFSNVTWFHAIHVSGTNGTKRFDNPVLPF
NDGVYFASTEKSNIIRGWIFGTTLDSKTQSLLIVNNATNVVIKVCEFQFCNDPFLGVYYH
KNNKSWMESEFRVYSSANNCTFEYVSQPFLMDLEGKQGNFKNLREFVFKNIDGYFKIYSK
HTPINLVRDLPQGFSALEPLVDLPIGINITRFQTLLALHRSYLTPGDSSSGWTAGAAAYY
VGYLQPRTFLLKYNENGTITDAVDCALDPLSETKCTLKSFTVEKGIYQTSNFRVQPTESI
VRFPNITNLCPFGEVFNATRFASVYAWNRKRISNCVADYSVLYNSASFSTFKCYGVSPTK
LNDLCFTNVYADSFVIRGDEVRQIAPGQTGKIADYNYKLPDDFTGCVIAWNSNNLDSKVG
GNYNYLYRLFRKSNLKPFERDISTEIYQAGSTPCNGVEGFNCYFPLQSYGFQPTNGVGYQ
PYRVVVLSFELLHAPATVCGPKKSTNLVKNKCVNFNFNGLTGTGVLTESNKKFLPFQQFG
RDIADTTDAVRDPQTLEILDITPCSFGGVSVITPGTNTSNQVAVLYQGVNCTEVPVAIHA
DQLTPTWRVYSTGSNVFQTRAGCLIGAEHVNNSYECDIPIGAGICASYQTQTNSPGSASS
VASQSIIAYTMSLGAENSVAYSNNSIAIPTNFTISVTTEILPVSMTKTSVDCTMYICGDS
TECSNLLLQYGSFCTQLNRALTGCAVEQDKNTQEVFAQVKQIYKTPPIKDFGGFNFSQIL
PDPSKPSKRSFIEDLLFNKVTLADAGFIKQYGDCLGDIAARDLICAQKFNGLTVLPPLLT
DEMIAQYTSALLAGTITSGWTFGAGAALQIPFAMQMAYRFNGIGVTQNVLYENQKLIANQ
FNSAIGKIQDSLSSTASALGKLQDVVNQNAQALNTLVKQLSSNFGAISSVLNDILSRLDP
PEAEVQIDRLITGRLQSLQTYVTQQLIRCAEIRASANLAATKMSECVLGQSKRVDFCGKG
YHLMSFPQSAPHGVVFLHVTYVPAQEKNFTTAPAICHDGKAHFPREGVFVSNGTHWFVTQ
RNFYEPQIITTDNTFVSGNCDVVIGIVNNTVYDPLQPELDS
SEQ ID NO: 36-(CoV_2_S_openDS2, SEQ ID NO: 4 as parent) mutant Spike (S)
protein amino acid sequence:
AYTNSFTRGVYYPDKVFRSSVLHSTQDLFLPFFSNVTWFHAIHVSGTNGTKRFDNPVLPF
NDGVYFASTEKSNIIRGWIFGTTLDSKTQSLLIVNNATNVVIKVCEFQFCNDPFLGVYYH
KNNKSWMESEFRVYSSANNCTFEYVSQPFLMDLEGKQGNFKNLREFVFKNIDGYFKIYSK
HTPINLVRDLPQGFSALEPLVDLPIGINITRFQTLLALHRSYLTPGDSSSGWTAGAAAYY
VGYLQPRTFLLKYNENGTITDAVDCALDPLSETKCTLKSFTVEKGIYQTSNFRVQPTESI
VRFPNITNLCPFGEVFNATRFASVYAWNRKRISNCVADYSVLYNSASFSTFKCYGVSPTK
LNDLCFTNVYADSFVIRGDEVRQIAPGQTGKIADYNYKLPDDFTGCVIAWNSNNLDSKVG
GNYNYLYRLFRKSNLKPFERDISTEIYQAGSTPCNGVEGFNCYFPLQSYGFQPTNGVGYQ
PYRVVVLSFELLHAPATVCGPKKSTNLVKNKCVNFNFNGLTGTGVLTESNKKFLPFQQFG
RDIADTTDAVRDPQTLEILDITPCSFGGVSVITPGTNTSNQVAVLYQGVNCTEVPVAIHA
DQLTPTWRVYSTGSNVFQTRAGCLIGAEHVNNSYECDIPIGAGICASYQTQTNSPGSASS
VASQSIIAYTMSLGAENSVAYSNNSIAIPTNFTISVTTEILPVSMTKTSVDCTMYICGDS
TECSNLLLQYGSFCTQLNRALTGIAVEQDKNTQEVFAQVKQIYKTPPIKDFGGFNFSQIL
PDPSKPSKRSFIEDLLFNKVTLADAGFIKQYGCCLGDIAARDLICAQKFNGLTVLCPLLT
DEMIAQYTSALLAGTITSGWTFGAGAALQIPFAMQMAYRFNGIGVTQNVLYENQKLIANQ
FNSAIGKIQDSLSSTASALGKLQDVVNQNAQALNTLVKQLSSNFGAISSVLNDILSRLDP
PEAEVQIDRLITGRLQSLQTYVTQQLIRAAEIRASANLAATKMSECVLGQSKRVDFCGKG
YHLMSFPQSAPHGVVFLHVTYVPAQEKNFTTAPAICHDGKAHFPREGVFVSNGTHWFVTQ
RNFYEPQIITTDNTFVSGNCDVVIGIVNNTVYDPLQPELDS
SEQ ID NO: 37-(CoV_2_S_openDS3, SEQ ID NO: 4 as parent) mutant Spike (S)
protein amino acid sequence:
AYTNSFTRGVYYPDKVFRSSVLHSTQDLFLPFFSNVTWFHAIHVSGTNGTKRFDNPVLPF
NDGVYFASTEKSNIIRGWIFGTTLDSKTQSLLIVNNATNVVIKVCEFQFCNDPFLGVYYH
KNNKSWMESEFRVYSSANNCTFEYVSQPFLMDLEGKQGNFKNLREFVFKNIDGYFKIYSK
HTPINLVRDLPQGFSALEPLVDLPIGINITRFQTLLALHRSYLTPGDSSSGWTAGAAAYY
VGYLQPRTFLLKYNENGTITDAVDCALDPLSETKCTLKSFTVEKGIYQTSNFRVQPTESI
VRFPNITNLCPFGEVFNATRFASVYAWNRKRISNCVADYSVLYNSASFSTFKCYGVSPTK
LNDLCFTNVYADSFVIRGDEVRQIAPGQTGKIADYNYKLPDDFTGCVIAWNSNNLDSKVG
GNYNYLYRLFRKSNLKPFERDISTEIYQAGSTPCNGVEGFNCYFPLQSYGFQPTNGVGYQ
PYRVVVLSFELLHAPATVCGPKKSTNLVKNKCVNFNFNGLTGTGVLTESNKKFLPFQQFG
RDICDTTDAVRDPQTLEILDITPCSFGGVSVITPGTNTSNQVAVLYQGVNCTEVPVAIHA
DQLTPTWRVYSTGSNVFQTRAGCLIGAEHVNNSYECDIPIGAGICASYQTQTNSPGSASS
VASQSIIAYTMSLGAENSVAYSNNSIAIPTNFTISVTTEILPVSMTKTSVDCTMYICGDS
TECSNLLLQYGSFCTQLNRALTGIAVEQDKNTQEVFAQVKQIYKTPPIKDFGGFNFSQIL
PDPSKPSKRSFIEDLLFNKVTLADAGFIKQYGDCLGDIAARDLICAQKFNGLTVLPPLLT
DEMIAQYTSALLAGTITSGWTFGAGAALQIPFAMQMAYRFNGIGVTQNVLYENQKLIANQ
FNSAIGKIQDSLSSTASALGKLQDVVNQNAQALNTLVKQLCSNFGAISSVLNDILSRLDP
PEAEVQIDRLITGRLQSLQTYVTQQLIRAAEIRASANLAATKMSECVLGQSKRVDFCGKG
YHLMSFPQSAPHGVVFLHVTYVPAQEKNFTTAPAICHDGKAHFPREGVFVSNGTHWFVTQ
RNFYEPQIITTDNTFVSGNCDVVIGIVNNTVYDPLQPELDS
SEQ ID NO: 38-(CoV_2_S_openDS4, SEQ ID NO: 4 as parent) mutant Spike (S)
protein amino acid sequence:
AYTNSFTRGVYYPDKVFRSSVLHSTQDLFLPFFSNVTWFHAIHVSGTNGTKRFDNPVLPF
NDGVYFASTEKSNIIRGWIFGTTLDSKTQSLLIVNNATNVVIKVCEFQFCNDPFLGVYYH
KNNKSWMESEFRVYSSANNCTFEYVSQPFLMDLEGKQGNFKNLREFVFKNIDGYFKIYSK
HTPINLVRDLPQGFSALEPLVDLPIGINITRFQTLLALHRSYLTPGDSSSGWTAGAAAYY
VGYLQPRTFLLKYNENGTITDAVDCALDPLSETKCTLKSFTVEKGIYQTSNFRVQPTESI
VRFPNITNLCPFGEVFNATRFASVYAWNRKRISNCVADYSVLYNSASFSTFKCYGVSPTK
LNDLCFTNVYADSFVIRGDEVRQIAPGQTGKIADYNYKLPDDFTGCVIAWNSNNLDSKVG
GNYNYLYRLFRKSNLKPFERDISTEIYQAGSTPCNGVEGFNCYFPLQSYGFQPTNGVGYQ
PYRVVVLSFELLHAPATVCGPKKSTNLVKNKCVNFNFNGLTGTGVLTESNKKFLPFQQFG
RDIADTTDAVRDPQTLEILCITPCSFGGVSVITPGTNTSNQVAVLYQGVNCTEVPVAIHA
DQLTPTWRVYSTGSNVFQTRAGCLIGAEHVNNSYECDIPIGAGICASYQTQTNSPGSASS
VASQSIIAYTMSLGAENSVAYSNNSIAIPTNFTISVTTEILPVSMTKTSVDCTMYICGDS
TECSNLLLQYGSFCTQLNRALTGIAVEQDKNTQEVFAQVKQIYKTPPIKDFGGFNFSQIL
PDPSKPSKRSFIEDLLFNKVTLADAGFIKQYGDCLGDIAARDLCCAQKFNGLTVLPPLLT
DEMIAQYTSALLAGTITSGWTFGAGAALQIPFAMQMAYRFNGIGVTQNVLYENQKLIANQ
FNSAIGKIQDSLSSTASALGKLQDVVNQNAQALNTLVKQLSSNFGAISSVLNDILSRLDP
PEAEVQIDRLITGRLQSLQTYVTQQLIRAAEIRASANLAATKMSECVLGQSKRVDFCGKG
YHLMSFPQSAPHGVVFLHVTYVPAQEKNFTTAPAICHDGKAHFPREGVFVSNGTHWFVTQ
RNFYEPQIITTDNTFVSGNCDVVIGIVNNTVYDPLQPELDS
SEQ ID NO: 39-(CoV_2_S_closedDS1, SEQ ID NO: 4 as parent) mutant Spike (S)
protein amino acid sequence:
AYTNSFTRGVYYPDKVFRSSVLHSTQDLFLPFFSNVTWFHAIHVSGTNGTKRFDNPVLPF
NDGVYFASTEKSNIIRGWIFGTTLDSKTQSLLIVNNATNVVIKVCEFQFCNDPFLGVYYH
KNNKSWMESEFRVYSSANNCTFEYVSQPFLMDLEGKQGNFKNLREFVFKNIDGYFKIYSK
HTPINLVRDLPQGFSALEPLVDLPIGINITRFQTLLALHRSYLTPGDSSSGWTAGAAAYY
VGYLQPRTFLLKYNENGTITDAVDCALDPLSETKCTLKSFTVEKGIYQTSNFRVQPTESI
VRFPNITNLCPFGEVFNATRFASVYAWNRKRISNCVADYSVLYNSASFSTFKCYGVSPTK
LNDLCFTNVYADSFVIRGDEVRQIAPCQTGKIADYNYKLPDDFTGCVIAWNSNNLDSKVG
GNYNYLYRLFRKSNLKPFERDISTEIYQAGSTPCNGVEGFNCYFPLQSYGFQPTNGVGYQ
PYRVVVLSFELLHAPATVCGPKKSTNLVKNKCVNFNFNGLTGTGVLTESNKKFLPFQQFG
RDIADTTDAVRDPQTLEILDITPCSFGGVSVITPGTNTSNQVAVLYQGVNCTEVPVAIHA
DQLTPTWRVYSTGSNVFQTRAGCLIGAEHVNNSYECDIPIGAGICASYQTQTNSPGSASS
VASQSIIAYTMSLGAENSVAYSNNSIAIPTNFTISVTTEILPVSMTKTSVDCTMYICGDS
TECSNLLLQYGSFCTQLNRALTGIAVEQDKNTQEVFAQVKQIYKTPPIKDFGGFNFSQIL
PDPSKPSKRSFIEDLLFNKVTLADAGFIKQYGDCLGDIAARDLICAQKFNGLTVLPPLLT
DEMIAQYTSALLAGTITSGWTFGAGAALQIPFAMQMAYRFNGIGVTQNVLYENQKLIANQ
FNSAIGKIQDSLSSTASALGKLQDVVNQNAQALNTLVKQLSSNFGAISSVLNDILSRLDP
CEAEVQIDRLITGRLQSLQTYVTQQLIRAAEIRASANLAATKMSECVLGQSKRVDFCGKG
YHLMSFPQSAPHGVVFLHVTYVPAQEKNFTTAPAICHDGKAHFPREGVFVSNGTHWFVTQ
RNFYEPQIITTDNTFVSGNCDVVIGIVNNTVYDPLQPELDS
SEQ ID NO: 40-(CoV_2_S_closedDS2, SEQ ID NO: 4 as parent) mutant Spike (S)
protein amino acid sequence:
AYTNSFTRGVYYPDKVFRSSVLHSTQDLFLPFFSNVTWFHAIHVSGTNGTKRFDNPVLPF
NDGVYFASTEKSNIIRGWIFGTTLDSKTQSLLIVNNATNVVIKVCEFQFCNDPFLGVYYH
KNNKSWMESEFRVYSSANNCTFEYVSQPFLMDLEGKQGNFKNLREFVFKNIDGYFKIYSK
HTPINLVRDLPQGFSALEPLVDLPIGINITRFQTLLALHRSYLTPGDSSSGWTAGAAAYY
VGYLQPRTFLLKYNENGTITDAVDCALDPLSETKCTLKSFTVEKGIYQTSNFRVQPTESI
VRFPNITNLCPFGEVFNATRFASVYAWNRKRISNCVADYSVLYNSASFSTFKCYGVCPTK
LNDLCFTNVYADSFVIRGDEVRQIAPGQTGKIADYNYKLPDDFTGCVIAWNSNNLDSKVG
GNYNYLYRLFRKSNLKPFERDISTEIYQAGSTPCNGVEGFNCYFPLQSYGFQPTNGVGYQ
PYRVVVLSFELLHAPATVCGPKKSTNLVKNKCVNFNFNGLTGTGVLTESNKKFLPFQQFG
RDIADTTDAVRDPQTLEILDITPCSFGGVSVITPGTNTSNQVAVLYQGVNCTEVPVAIHA
DQLTPTWRVYSTGSNVFQTRAGCLIGAEHVNNSYECDIPIGAGICASYQTQTNSPGSASS
VASQSIIAYTMSLGAENSVAYSNNSIAIPTNFTISVTTEILPVSMTKTSVDCTMYICGDS
TECSNLLLQYGSFCTQLNRALTGIAVEQDKNTQEVFAQVKQIYKTPPIKDFGGFNFSQIL
PDPSKPSKRSFIEDLLFNKVTLADAGFIKQYGDCLGDIAARDLICAQKFNGLTVLPPLLT
DEMIAQYTSALLAGTITSGWTFGAGAALQIPFAMQMAYRFNGIGVTQNVLYENQKLIANQ
FNSAIGKIQDSLSSTASALGKLQDVVNQNAQALNTLVKQLSSNFGAISSVLNDILSRLCP
PEAEVQIDRLITGRLQSLQTYVTQQLIRAAEIRASANLAATKMSECVLGQSKRVDFCGKG
YHLMSFPQSAPHGVVFLHVTYVPAQEKNFTTAPAICHDGKAHFPREGVFVSNGTHWFVTQ
RNFYEPQIITTDNTFVSGNCDVVIGIVNNTVYDPLQPELDS
SEQ ID NO: 41-(CoV_2_S_closedDS3, SEQ ID NO: 4 as parent) mutant Spike (S)
protein amino acid sequence:
AYTNSFTRGVYYPDKVFRSSVLHSTQDLFLPFFSNVTWFHAIHVSGTNGTKRFDNPVLPF
NDGVYFASTEKSNIIRGWIFGTTLDSKTQSLLIVNNATNVVIKVCEFQFCNDPFLGVYYH
KNNKSWMESEFRVYSSANNCTFEYVSQPFLMDLEGKQGNFKNLREFVFKNIDGYFKIYSK
HTPINLVRDLPQGFSALEPLVDLPIGINITRFQTLLALHRSYLTPGDSSSGWTAGAAAYY
VGYLQPRTFLLKYNENGTITDAVDCALDPLSETKCTLKSFTVEKGIYQTSNFRVQPTESI
VRFPNITNLCPFGEVFNATRFASVYAWNRKRISNCVADYSVLYNSASFSTFKCYGCSPTK
LNDLCFTNVYADSFVIRGDEVRQIAPGQTGKIADYNYKLPDDFTGCVIAWNSNNLDSKVG
GNYNYLYRLFRKSNLKPFERDISTEIYQAGSTPCNGVEGFNCYFPLQSYGFQPTNGVGYQ
PYRVVVLSFELLHAPATVCGPKKSTNLVKNKCVNFNFNGLTGTGVLTESNKKFLPFQQFG
RDIADTTDAVRDPQTLEILDITPCSFGGVSVITPGTNTSNQVAVLYQGVNCTEVPVAIHA
DQLTPTWRVYSTGSNVFQTRAGCLIGAEHVNNSYECDIPIGAGICASYQTQTNSPGSASS
VASQSIIAYTMSLGAENSVAYSNNSIAIPTNFTISVTTEILPVSMTKTSVDCTMYICGDS
TECSNLLLQYGSFCTQLNRALTGIAVEQDKNTQEVFAQVKQIYKTPPIKDFGGFNFSQIL
PDPSKPSKRSFIEDLLFNKVTLADAGFIKQYGDCLGDIAARDLICAQKFNGLTVLPPLLT
DEMIAQYTSALLAGTITSGWTFGAGAALQIPFAMQMAYRFNGIGVTQNVLYENQKLIANQ
FNSAIGKIQDSLSSTASALGKLQDVVNQNAQALNTLVKQLSSNFGAISSVLNDILSCLDP
PEAEVQIDRLITGRLQSLQTYVTQQLIRAAEIRASANLAATKMSECVLGQSKRVDFCGKG
YHLMSFPQSAPHGVVFLHVTYVPAQEKNFTTAPAICHDGKAHFPREGVFVSNGTHWFVTQ
RNFYEPQIITTDNTFVSGNCDVVIGIVNNTVYDPLQPELDS
SEQ ID NO: 42-(CoV_2_S_closedDS4, SEQ ID NO: 4 as parent) mutant Spike (S)
protein amino acid sequence:
AYTNSFTRGVYYPDCVFRSSVLHSTQDLFLPFFSNVTWFHAIHVSGTNGTKRFDNPVLPF
NDGVYFASTEKSNIIRGWIFGTTLDSKTQSLLIVNNATNVVIKVCEFQFCNDPFLGVYYH
KNNKSWMESEFRVYSSANNCTFEYVSQPFLMDLEGKQGNFKNLREFVFKNIDGYFKIYSK
HTPINLVRDLPQGFSALEPLVDLPIGINITRFQTLLALHRSYLTPGDSSSGWTAGAAAYY
VGYLQPRTFLLKYNENGTITDAVDCALDPLSETKCTLKSFTVEKGIYQTSNFRVQPTESI
VRFPNITNLCPFGEVFNATRFASVYAWNRKRISNCVADYSVLYNSASFSTFKCYGVSPTK
LNDLCFTNVYADSFVIRGDEVRQIAPGQTGKIADYNYKLPDDFTGCVIAWNSNNLDSKVG
GNYNYLYRLFRKSNLKPFERDISTEIYQAGSTPCNGVEGFNCYFPLQSYGFQPTNGVGYQ
PYRVVVLSFELLHCPATVCGPKKSTNLVKNKCVNFNFNGLTGTGVLTESNKKFLPFQQFG
RDIADTTDAVRDPQTLEILDITPCSFGGVSVITPGTNTSNQVAVLYQGVNCTEVPVAIHA
DQLTPTWRVYSTGSNVFQTRAGCLIGAEHVNNSYECDIPIGAGICASYQTQTNSPGSASS
VASQSIIAYTMSLGAENSVAYSNNSIAIPTNFTISVTTEILPVSMTKTSVDCTMYICGDS
TECSNLLLQYGSFCTQLNRALTGIAVEQDKNTQEVFAQVKQIYKTPPIKDFGGFNFSQIL
PDPSKPSKRSFIEDLLFNKVTLADAGFIKQYGDCLGDIAARDLICAQKFNGLTVLPPLLT
DEMIAQYTSALLAGTITSGWTFGAGAALQIPFAMQMAYRFNGIGVTQNVLYENQKLIANQ
FNSAIGKIQDSLSSTASALGKLQDVVNQNAQALNTLVKQLSSNFGAISSVLNDILSRLDP
PEAEVQIDRLITGRLQSLQTYVTQQLIRAAEIRASANLAATKMSECVLGQSKRVDFCGKG
YHLMSFPQSAPHGVVFLHVTYVPAQEKNFTTAPAICHDGKAHFPREGVFVSNGTHWFVTQ
RNFYEPQIITTDNTFVSGNCDVVIGIVNNTVYDPLQPELDS
SEQ ID NO: 43-(CoV_2_S_closedDS5, SEQ ID NO: 4 as parent) mutant Spike (S)
protein amino acid sequence:
AYTNSFTRGVYYPDKVFRSSVLHSTQDLFLPFFSNVTWFHAIHVSGTNGTKRFDNPVLPF
NDGVYFASTEKSNIIRGWIFGTTLDSKTQSLLIVNNATNVVIKVCEFQFCNDPFLGVYYH
KNNKSWMESEFRVYSSANNCTFEYVSQPFLMDLEGKQGNFKNLREFVFKNIDGYFKIYSK
HTPINLVRDLPQGFSALEPLVDLPIGINITRFQTLLALHRSYLTPGDSSSGWTAGAAAYY
VGYLQPRTFLLKYNENGTITDAVDCALDPLSETKCTLKSFTVEKGIYQTSNFRVQPTESI
VRFPNITNLCPFGEVFNATRFASVYAWNRKRISNCVADYSVLYNSASFSTFKCYGVSPTK
LNDLCFTNVYADSFVIRGDEVRQIAPGQTGKIADYNYKLPDDFTGCVIAWNSNNLDSKVG
GNYNYLYRLFRKSNLKPFERDISTEIYQAGSTPCNGVEGFNCYFPLQSYGFQPTNGVGYQ
PYRVVVLSFELLHAPCTVCGPKKSTNLVKNKCVNFNFCGLTGTGVLTESNKKFLPFQQFG
RDIADTTDAVRDPQTLEILDITPCSFGGVSVITPGTNTSNQVAVLYQGVNCTEVPVAIHA
DQLTPTWRVYSTGSNVFQTRAGCLIGAEHVNNSYECDIPIGAGICASYQTQTNSPGSASS
VASQSIIAYTMSLGAENSVAYSNNSIAIPTNFTISVTTEILPVSMTKTSVDCTMYICGDS
TECSNLLLQYGSFCTQLNRALTGIAVEQDKNTQEVFAQVKQIYKTPPIKDFGGFNFSQIL
PDPSKPSKRSFIEDLLFNKVTLADAGFIKQYGDCLGDIAARDLICAQKFNGLTVLPPLLT
DEMIAQYTSALLAGTITSGWTFGAGAALQIPFAMQMAYRFNGIGVTQNVLYENQKLIANQ
FNSAIGKIQDSLSSTASALGKLQDVVNQNAQALNTLVKQLSSNFGAISSVLNDILSRLDP
PEAEVQIDRLITGRLQSLQTYVTQQLIRAAEIRASANLAATKMSECVLGQSKRVDFCGKG
YHLMSFPQSAPHGVVFLHVTYVPAQEKNFTTAPAICHDGKAHFPREGVFVSNGTHWFVTQ
RNFYEPQIITTDNTFVSGNCDVVIGIVNNTVYDPLQPELDS
SEQ ID NO: 44-(CoV_2_S_closedDS6, SEQ ID NO: 4 as parent) mutant Spike (S)
protein amino acid sequence:
AYTNSFTRGVYYPDKVFRSSVLHSTQDLFLPFFSNVTWFHAIHVSGTNGTKRFDNPVLPF
NDGVYFASTEKSNIIRGWIFGTTLDSKTQSLLIVNNATNVVIKVCEFQFCNDPFLGVYYH
KNNKSWMESEFRVYSSANNCTFEYVSQPFLMDLEGKQGNFKNLREFVFKNIDGYFKIYSK
HTPINLVRDLPQGFSALEPLVDLPIGINITRFQTLLALHRSYLTPGDSSSGWTAGAAAYY
VGYLQPRTFLLKYNENGTITDAVDCALDPLSETKCTLKSFTVEKGIYQTSNFRVQPTESI
VRFPNITNLCPFGEVFNATRFASVYAWNRKRISNCVADYSVLYNSASFSTFKCYGVSPTK
LNDLCFTNVYADSFVIRGDEVRQIAPGQTGKIADYNYKLPDDFTGCVIAWNSNNLDSKVG
GNYNYLYRLFRKSNLKPFERDISTEIYQAGSTPCNGVEGFNCYFPLQSYGFQPTNGVGYQ
PYRVVVLSFELLHACATVCGPKKSTNLVKNKCVNFNFNGLTGTGVLTESNKKFLPFQCFG
RDIADTTDAVRDPQTLEILDITPCSFGGVSVITPGTNTSNQVAVLYQGVNCTEVPVAIHA
DQLTPTWRVYSTGSNVFQTRAGCLIGAEHVNNSYECDIPIGAGICASYQTQTNSPGSASS
VASQSIIAYTMSLGAENSVAYSNNSIAIPTNETISVTTEILPVSMTKTSVDCTMYICGDS
TECSNLLLQYGSFCTQLNRALTGIAVEQDKNTQEVFAQVKQIYKTPPIKDFGGFNFSQIL
PDPSKPSKRSFIEDLLFNKVTLADAGFIKQYGDCLGDIAARDLICAQKFNGLTVLPPLLT
DEMIAQYTSALLAGTITSGWTFGAGAALQIPFAMQMAYRFNGIGVTQNVLYENQKLIANQ
FNSAIGKIQDSLSSTASALGKLQDVVNQNAQALNTLVKQLSSNFGAISSVLNDILSRLDP
PEAEVQIDRLITGRLQSLQTYVTQQLIRAAEIRASANLAATKMSECVLGQSKRVDFCGKG
YHLMSFPQSAPHGVVFLHVTYVPAQEKNFTTAPAICHDGKAHFPREGVFVSNGTHWFVTQ
RNFYEPQIITTDNTFVSGNCDVVIGIVNNTVYDPLQPELDS
SEQ ID NO: 45-(CoV2_S_1_hbnet_openDS1, SEQ ID NO: 5 as parent) mutant Spike
(S) protein amino acid sequence:
AYTNSFTRGVYYPDKVSMSSVLHSTQDLFLPFFSNVTWFHAIHVSGTNGTKRFDNPVLPF
NDGVYFASTEKSNIIRGWIFGTTLDSKTQSLLIVNNATNVVIKVCEFQFCNDPFLGVYYH
KNNKSWMESEFRVYSSANNCTFEYVSQPFLMDLEGKQGNFKNLREFVFKNIDGYFKIYSK
HTPINLVRDLPQGFSALELLVDLPIGINITRFQTLLALHRSYLTPGDSSSGWTAGAAAYY
VGYLQPRTFLLKYNENGVITDAVDCALDPLSETKCTLKSFTVEKGIYITSLFEVQPTESI
VRFPNITNLCPFGEVFNATRFASVYAWNRKRISNCVADYSVLYNSASFSTFKCYGVSPTK
LNDLCFTNVYADSFVIRGDEVRQIAPGQTGKIADYNYKLPDDFTGCVIAWNSNNLDSKVG
GNYNYLYRLFRKSNLKPFERDISTEIYQAGSTPCNGVEGFNCYFPLQSYGFQPTNGVGYQ
PYRVVVLSFELNHAPATVCGPKKSTNLVKNKCVNFNFNGLTGTGVLTESNLKFVSTQLFR
VHSANTTLAVRDPQTLEILDIVSCSSGAVSVITPGTNTSNQVAVLYYNVWCTEVPVAIHA
DQLTPTWRVYSTGSNVFQTKAGCLIGAEHVNNSYECDIAIGGGICASYQTQTNSPGSASS
VASQSIIAYWISTGSWNSVDNSNDAIAIATNFTISVTTEILPVSMTKTWVICTLYICGGS
TECSNLLAQYGSFCTELNRALTGCAVEQDKNTWEVFAQVRTIFHTPSIKDFGGFNFSQIL
PDPSKPSKRSFIEDLLFNKVTLADAGFIKQYGDCLGDIAARDLSCHQDSRGLNILSSLLT
DELIAEFTSALLAGTITAGWSFTAGHALNIPWAVQMAWRFAGIGVTENVLAKNQKLIANQ
FNSAIGKIQDSLSSTASALGKLQDVVNQNAQALDELERELSSNFGAISSVLNDILSNLDP
PEAEVQIDRLILGRLMALAAFVTAQLIRCAEIRASANLAATKMAECVAGQSKLVGFCGEG
WHLMSFPQSAPHGVVFLHVTLVAGQTKNFTTALAICHDGKAHIPRNGVFVSNGTHWFVTQ
EQFYEPLIITTDLVLVSGNCDDVIGIVNNTVYDPKQPELDS
SEQ ID NO: 46-(CoV2_S2_1_hbnet_openDS1, SEQ ID NO: 10 as parent) mutant
Spike (S) protein amino acid sequence:
AYTNSFTRGVYYPDKVFRSSVLHSTQDLFLPFFSNVTWFHAIHVSGTNGTKRFDNPVLPF
NDGVYFASTEKSNIIRGWIFGTTLDSKTQSLLIVNNATNVVIKVCEFQFCNDPFLGVYYH
KNNKSWMESEFRVYSSANNCTFEYVSQPFLMDLEGKQGNFKNLREFVFKNIDGYFKIYSK
HTPINLVRDLPQGFSALEPLVDLPIGINITRFQTLLALHRSYLTPGDSSSGWTAGAAAYY
VGYLQPRTFLLKYNENGTITDAVDCALDPLSETKCTLKSFTVEKGIYQTSNFRVQPTESI
VRFPNITNLCPFGEVFNATRFASVYAWNRKRISNCVADYSVLYNSASFSTFKCYGVSPTK
LNDLCFTNVYADSFVIRGDEVRQIAPGQTGKIADYNYKLPDDFTGCVIAWNSNNLDSKVG
GNYNYLYRLFRKSNLKPFERDISTEIYQAGSTPCNGVEGFNCYFPLQSYGFQPTNGVGYQ
PYRVVVLSFELLHAPATVCGPKKSTNLVKNKCVNFNFNGLTGTGVLTESNKKFLPFQQFG
RDIADTTDAVRDPQTLEILDITPCSFGGVSVITPGTNTSNQVAVLYQGVNCTEVPVAIHA
DQLTPTWRVYSTGSNVFQTRAGCLIGAEHVNNSYECDIPIGAGICASYQTQTNSPGSASS
VASQSIIAYQISTGSWNSVENSNDAIAIATNFTISVTTEILPVSMTKTWVDCTLYICGGS
TECSNLLAQYGSFCTELNRMLTGCAVEQDKNTWEVFATVRTIFHTPSIKDFGGFNFSQIL
PDPSKPSKRSFIEDLLFNKVTLADAGFIKQYGDCLGDIAARDSSCAQKANGLNILSSLLT
DELIAEFTSALLAGTITAGWSFTAGAALNIPWWAQMAWRFAGIGVTENVLAKNQKLIANQ
FNSAIGKIQDSLSSTASALGKLQDVVNQNAQALAELEKELSSNFGAISSVLNDILSNLDP
PEAEVQIDRLILGRLMALAAFVTAQAIRCAEIRASANLAATKMRECVAGQSKLVGFCGEG
WHLMSFPQSAPHGVVFLHVTLVAGQYKNFTTAPAICHDGKAHIPRNGVFVSNGTHWFVTQ
EQFYEPLIITTDLVLVSGNCDDVIGIVNNTVYDPKQPELDS
SEQ ID NO: 47-(CoV2_S2_NTD_6_pross_openDSl, SEQ ID NO: 24 as parent) mutant
Spike (S) protein amino acid sequence:
AYTNSFTRGVYYPDKVFRSNVLHLTQDLFLPFFSNVTWFHAIHVSGTNGTKRFDNPVLPF
NDGVYFASTEKSNIIRGWIFGTTLDSKTQSLLIVNNATNVVIKVCEFQFCEDPFLGVYYH
KNNKSWMESEFHVYSSANNCTFEYVSQPFLMDLEGKQGNFKNLREFVFKNIDGYFKIYSK
HTPINLVRDLPQGFSALEPLVDLPIGINITRFQILLALHRSYLTPGDSSSGWTAGAAAYY
VGYLQPRTFLLKYNENGTITDAVDCALDPLSETKCTLKSFTVEKGIYQTSNFRVQPTESI
VRFPNITNLCPFGEVFNATRFASVYAWNRKRISNCVADYSVLYNSASFSTFKCYGVSPTK
LNDLCFTNVYADSFVIRGDEVRQIAPGQTGKIADYNYKLPDDFTGCVIAWNSNNLDSKVG
GNYNYLYRLFRKSNLKPFERDISTEIYQAGSTPCNGVEGFNCYFPLQSYGFQPTNGVGYQ
PYRVVVLSFELLHAPATVCGPKKSTNLVKNKCVNFNFNGLTGTGVLTESNKKFLPFQQFG
RDIADTTDAVRDPQTLEILDITPCSFGGVSVITPGTNTSNQVAVLYQGVNCTEVPVAIHA
DQLTPTWRVYSTGSNVFQTRAGCLIGAEHVNNSYECDIPIGAGICASYQTQTNSPGSASS
VASQSIIAYTMSLGAENSVAYSNNSIAIPTNFTISVTTEIIPVSMPKTSVDCTMYICGDS
TECSNLLLQYGSFCTQLNRALTECAVEQDKNTQEVFAQVKQIYKTPPIKDFGGFNFSQIL
PDPSKPSKRSFIEDLLFNKVTLADAGFIKGYGDCLGDIAARDLICAQKFNGLTVLPPLLT
DEMIAAYTSALLAGTITAGWTFGAGAALQIPFAMQMAYRFNGIGVTQNVLYENQKLIANQ
FNKAIGKIQDGLSSTASALGKLQDVVNQNAQALNTLVKQLSSNFGAISSVLNDILSRLDP
PEAEVQIDRLINGRLQSLQTYVTQQLIRCAEIRASANLAAEKMSECVLGQSKRVDFCGKG
YHLMSFPQSAPHGVVFLHVTYVPTQHKNFTTAPAICHDGKAHFPREGVFVSNGTHWFVTQ
RNFYEPQIITTDNTFVSGNCDVVIGIVNNTVYDPLQPELDS
SEQ ID NO: 48-(CoV2_S2_6_pross_openDSl, SEQ ID NO: 29 as parent) mutant
Spike (S) protein amino acid sequence:
AYTNSFTRGVYYPDKVFRSSVLHSTQDLFLPFFSNVTWFHAIHVSGTNGTKRFDNPVLPF
NDGVYFASTEKSNIIRGWIFGTTLDSKTQSLLIVNNATNVVIKVCEFQFCNDPFLGVYYH
KNNKSWMESEFRVYSSANNCTFEYVSQPFLMDLEGKQGNFKNLREFVFKNIDGYFKIYSK
HTPINLVRDLPQGFSALEPLVDLPIGINITRFQTLLALHRSYLTPGDSSSGWTAGAAAYY
VGYLQPRTFLLKYNENGTITDAVDCALDPLSETKCTLKSFTVEKGIYQTSNFRVQPTESI
VRFPNITNLCPFGEVFNATRFASVYAWNRKRISNCVADYSVLYNSASFSTFKCYGVSPTK
LNDLCFTNVYADSFVIRGDEVRQIAPGQTGKIADYNYKLPDDFTGCVIAWNSNNLDSKVG
GNYNYLYRLFRKSNLKPFERDISTEIYQAGSTPCNGVEGFNCYFPLQSYGFQPTNGVGYQ
PYRVVVLSFELLHAPATVCGPKKSTNLVKNKCVNFNFNGLTGTGVLTESNKKFLPFQQFG
RDIADTTDAVRDPQTLEILDITPCSFGGVSVITPGTNTSNQVAVLYQGVNCTEVPVAIHA
DQLTPTWRVYSTGSNVFQTRAGCLIGAEHVNNSYECDIPIGAGICASYQTQTNSPGSASS
VASQSIIAYTMSLGAENSVAYSNNSIAIPTNFTISVTTEIIPVSMPKTSVDCTMYICGDS
TECSNLLLQYGSFCTQLNRALTECAVEQDKNTQEVFAQVKQIYKTPPIKDFGGFNFSQIL
PDPSKPSKRSFIEDLLFNKVTLADAGFIKGYGDCLGDIAARDLICAQKFNGLTVLPPLLT
DEMIAAYTSALLAGTITAGWTFGAGAALQIPFAMQMAYRFNGIGVTQNVLYENQKLIANQ
FNKAIGKIQDGLSSTASALGKLQDVVNQNAQALNTLVKQLSSNFGAISSVLNDILSRLDP
PEAEVQIDRLINGRLQSLQTYVTQQLIRCAEIRASANLAAEKMSECVLGQSKRVDFCGKG
YHLMSFPQSAPHGVVFLHVTYVPTQHKNFTTAPAICHDGKAHFPREGVFVSNGTHWFVTQ
RNFYEPQIITTDNTFVSGNCDVVIGIVNNTVYDPLQPELDS
SEQ ID NO: 49-(CoV2_S2_1_hbnet_pross_openDS1, SEQ ID NO: 30 as parent)
mutant Spike (S) protein amino acid sequence:
AYTNSFTRGVYYPDKVFRSSVLHSTQDLFLPFFSNVTWFHAIHVSGTNGTKRFDNPVLPF
NDGVYFASTEKSNIIRGWIFGTTLDSKTQSLLIVNNATNVVIKVCEFQFCNDPFLGVYYH
KNNKSWMESEFRVYSSANNCTFEYVSQPFLMDLEGKQGNFKNLREFVFKNIDGYFKIYSK
HTPINLVRDLPQGFSALEPLVDLPIGINITRFQTLLALHRSYLTPGDSSSGWTAGAAAYY
VGYLQPRTFLLKYNENGTITDAVDCALDPLSETKCTLKSFTVEKGIYQTSNFRVQPTESI
VRFPNITNLCPFGEVFNATRFASVYAWNRKRISNCVADYSVLYNSASFSTFKCYGVSPTK
LNDLCFTNVYADSFVIRGDEVRQIAPGQTGKIADYNYKLPDDFTGCVIAWNSNNLDSKVG
GNYNYLYRLFRKSNLKPFERDISTEIYQAGSTPCNGVEGFNCYFPLQSYGFQPTNGVGYQ
PYRVVVLSFELLHAPATVCGPKKSTNLVKNKCVNFNFNGLTGTGVLTESNKKFLPFQQFG
RDIADTTDAVRDPQTLEILDITPCSFGGVSVITPGTNTSNQVAVLYQGVNCTEVPVAIHA
DQLTPTWRVYSTGSNVFQTRAGCLIGAEHVNNSYECDIPIGAGICASYQTQTNSPGSASS
VASQSIIAYTMSLGAENSVAYSNNSIAIATNFTISVTTEILPVSMTKTSVDCTMYICGGS
TECSNLLLQYGSFCTQLNRALTECAVEQDKNTQEVFAQVKQIYKTPPIKDFGGFNFSQIL
PDPSKPSKRSAIEDLLFNKVKLADAGFIKGYGDCLGDIAARDSICAQKFNGLTILSSLLT
DEMIAAFTSALLAGTITAGWTFGAGAALQIPFAMQMAYRFAGIGVTQNVLYENQKLIANQ
FNNAIGKIQDGLSSTASALGKLQDVVNQNAQALNTLVKQLSSNFGAISSVLNDILSNLDP
PEAEVQIDRLITGRLQSLQTYVTQQAIRCAEIRASANLAATKMSECVLGQSKLVDFCGKG
YHLMSFPQSAPHGVVFLHVTYVATQYKNFTTAPAICHDGKAHFPREGVFVSNGTHWFVTQ
RNFYEPQIITTDLTEVSGNCDVVIGIVNNTVYDPLQPELDS
SEQ ID NO: 50-(CoV2_S_1_hbnet_openDS2, SEQ ID NO: 5 as parent) mutant Spike
(S) protein amino acid sequence:
AYTNSFTRGVYYPDKVSMSSVLHSTQDLFLPFFSNVTWFHAIHVSGTNGTKRFDNPVLPF
NDGVYFASTEKSNIIRGWIFGTTLDSKTQSLLIVNNATNVVIKVCEFQFCNDPFLGVYYH
KNNKSWMESEFRVYSSANNCTFEYVSQPFLMDLEGKQGNFKNLREFVFKNIDGYFKIYSK
HTPINLVRDLPQGFSALELLVDLPIGINITRFQTLLALHRSYLTPGDSSSGWTAGAAAYY
VGYLQPRTFLLKYNENGVITDAVDCALDPLSETKCTLKSFTVEKGIYITSLFEVQPTESI
VRFPNITNLCPFGEVFNATRFASVYAWNRKRISNCVADYSVLYNSASFSTFKCYGVSPTK
LNDLCFTNVYADSFVIRGDEVRQIAPGQTGKIADYNYKLPDDFTGCVIAWNSNNLDSKVG
GNYNYLYRLFRKSNLKPFERDISTEIYQAGSTPCNGVEGFNCYFPLQSYGFQPTNGVGYQ
PYRVVVLSFELNHAPATVCGPKKSTNLVKNKCVNFNFNGLTGTGVLTESNLKFVSTQLFR
VHSANTTLAVRDPQTLEILDIVSCSSGAVSVITPGTNTSNQVAVLYYNVWCTEVPVAIHA
DQLTPTWRVYSTGSNVFQTKAGCLIGAEHVNNSYECDIAIGGGICASYQTQTNSPGSASS
VASQSIIAYWISTGSWNSVDNSNDAIAIATNFTISVTTEILPVSMTKTWVICTLYICGGS
TECSNLLAQYGSFCTELNRALTGIAVEQDKNTWEVFAQVRTIFHTPSIKDFGGFNFSQIL
PDPSKPSKRSFIEDLLFNKVTLADAGFIKQYGCCLGDIAARDLSCHQDSRGLNILCSLLT
DELIAEFTSALLAGTITAGWSFTAGHALNIPWAVQMAWRFAGIGVTENVLAKNQKLIANQ
FNSAIGKIQDSLSSTASALGKLQDVVNQNAQALDELERELSSNFGAISSVLNDILSNLDP
PEAEVQIDRLILGRLMALAAFVTAQLIRAAEIRASANLAATKMAECVAGQSKLVGFCGEG
WHLMSFPQSAPHGVVFLHVTLVAGQTKNFTTALAICHDGKAHIPRNGVFVSNGTHWFVTQ
EQFYEPLIITTDLVLVSGNCDDVIGIVNNTVYDPKQPELDS
SEQ ID NO: 51-(CoV2_S2_1_hbnet_openDS2, SEQ ID NO: 10 as parent) mutant
Spike (S) protein amino acid sequence:
AYTNSFTRGVYYPDKVFRSSVLHSTQDLFLPFFSNVTWFHAIHVSGTNGTKRFDNPVLPF
NDGVYFASTEKSNIIRGWIFGTTLDSKTQSLLIVNNATNVVIKVCEFQFCNDPFLGVYYH
KNNKSWMESEFRVYSSANNCTFEYVSQPFLMDLEGKQGNFKNLREFVFKNIDGYFKIYSK
HTPINLVRDLPQGFSALEPLVDLPIGINITRFQTLLALHRSYLTPGDSSSGWTAGAAAYY
VGYLQPRTFLLKYNENGTITDAVDCALDPLSETKCTLKSFTVEKGIYQTSNFRVQPTESI
VRFPNITNLCPFGEVFNATRFASVYAWNRKRISNCVADYSVLYNSASFSTFKCYGVSPTK
LNDLCFTNVYADSFVIRGDEVRQIAPGQTGKIADYNYKLPDDFTGCVIAWNSNNLDSKVG
GNYNYLYRLFRKSNLKPFERDISTEIYQAGSTPCNGVEGFNCYFPLQSYGFQPTNGVGYQ
PYRVVVLSFELLHAPATVCGPKKSTNLVKNKCVNFNFNGLTGTGVLTESNKKFLPFQQFG
RDIADTTDAVRDPQTLEILDITPCSFGGVSVITPGTNTSNQVAVLYQGVNCTEVPVAIHA
DQLTPTWRVYSTGSNVFQTRAGCLIGAEHVNNSYECDIPIGAGICASYQTQTNSPGSASS
VASQSIIAYQISTGSWNSVENSNDAIAIATNFTISVTTEILPVSMTKTWVDCTLYICGGS
TECSNLLAQYGSFCTELNRMLTGIAVEQDKNTWEVFATVRTIFHTPSIKDFGGFNFSQIL
PDPSKPSKRSFIEDLLFNKVTLADAGFIKQYGCCLGDIAARDSSCAQKANGLNILCSLLT
DELIAEFTSALLAGTITAGWSFTAGAALNIPWWAQMAWRFAGIGVTENVLAKNQKLIANQ
FNSAIGKIQDSLSSTASALGKLQDVVNQNAQALAELEKELSSNFGAISSVLNDILSNLDP
PEAEVQIDRLILGRLMALAAFVTAQAIRAAEIRASANLAATKMRECVAGQSKLVGFCGEG
WHLMSFPQSAPHGVVFLHVTLVAGQYKNFTTAPAICHDGKAHIPRNGVFVSNGTHWFVTQ
EQFYEPLIITTDLVLVSGNCDDVIGIVNNTVYDPKQPELDS
SEQ ID NO: 52-(CoV2_S2_NTD_6_pross_openDS2, SEQ ID NO: 24 as parent) mutant
Spike (S) protein amino acid sequence:
AYTNSFTRGVYYPDKVFRSNVLHLTQDLFLPFFSNVTWFHAIHVSGTNGTKRFDNPVLPF
NDGVYFASTEKSNIIRGWIFGTTLDSKTQSLLIVNNATNVVIKVCEFQFCEDPFLGVYYH
KNNKSWMESEFHVYSSANNCTFEYVSQPFLMDLEGKQGNFKNLREFVFKNIDGYFKIYSK
HTPINLVRDLPQGFSALEPLVDLPIGINITRFQILLALHRSYLTPGDSSSGWTAGAAAYY
VGYLQPRTFLLKYNENGTITDAVDCALDPLSETKCTLKSFTVEKGIYQTSNFRVQPTESI
VRFPNITNLCPFGEVFNATRFASVYAWNRKRISNCVADYSVLYNSASFSTFKCYGVSPTK
LNDLCFTNVYADSFVIRGDEVRQIAPGQTGKIADYNYKLPDDFTGCVIAWNSNNLDSKVG
GNYNYLYRLFRKSNLKPFERDISTEIYQAGSTPCNGVEGFNCYFPLQSYGFQPTNGVGYQ
PYRVVVLSFELLHAPATVCGPKKSTNLVKNKCVNFNFNGLTGTGVLTESNKKFLPFQQFG
RDIADTTDAVRDPQTLEILDITPCSFGGVSVITPGTNTSNQVAVLYQGVNCTEVPVAIHA
DQLTPTWRVYSTGSNVFQTRAGCLIGAEHVNNSYECDIPIGAGICASYQTQTNSPGSASS
VASQSIIAYTMSLGAENSVAYSNNSIAIPTNFTISVTTEIIPVSMPKTSVDCTMYICGDS
TECSNLLLQYGSFCTQLNRALTEIAVEQDKNTQEVFAQVKQIYKTPPIKDFGGFNFSQIL
PDPSKPSKRSFIEDLLFNKVTLADAGFIKGYGCCLGDIAARDLICAQKFNGLTVLCPLLT
DEMIAAYTSALLAGTITAGWTFGAGAALQIPFAMQMAYRFNGIGVTQNVLYENQKLIANQ
FNKAIGKIQDGLSSTASALGKLQDVVNQNAQALNTLVKQLSSNFGAISSVLNDILSRLDP
PEAEVQIDRLINGRLQSLQTYVTQQLIRAAEIRASANLAAEKMSECVLGQSKRVDFCGKG
YHLMSFPQSAPHGVVFLHVTYVPTQHKNFTTAPAICHDGKAHFPREGVFVSNGTHWFVTQ
RNFYEPQIITTDNTFVSGNCDVVIGIVNNTVYDPLQPELDS
SEQ ID NO: 53-(CoV2_S2_6_pross_openDS2, SEQ ID NO: 29 as parent) mutant
Spike (S) protein amino acid sequence:
AYTNSFTRGVYYPDKVFRSSVLHSTQDLFLPFFSNVTWFHAIHVSGTNGTKRFDNPVLPF
NDGVYFASTEKSNIIRGWIFGTTLDSKTQSLLIVNNATNVVIKVCEFQFCNDPFLGVYYH
KNNKSWMESEFRVYSSANNCTFEYVSQPFLMDLEGKQGNFKNLREFVFKNIDGYFKIYSK
HTPINLVRDLPQGFSALEPLVDLPIGINITRFQTLLALHRSYLTPGDSSSGWTAGAAAYY
VGYLQPRTFLLKYNENGTITDAVDCALDPLSETKCTLKSFTVEKGIYQTSNFRVQPTESI
VRFPNITNLCPFGEVFNATRFASVYAWNRKRISNCVADYSVLYNSASFSTFKCYGVSPTK
LNDLCFTNVYADSFVIRGDEVRQIAPGQTGKIADYNYKLPDDFTGCVIAWNSNNLDSKVG
GNYNYLYRLFRKSNLKPFERDISTEIYQAGSTPCNGVEGFNCYFPLQSYGFQPTNGVGYQ
PYRVVVLSFELLHAPATVCGPKKSTNLVKNKCVNFNFNGLTGTGVLTESNKKFLPFQQFG
RDIADTTDAVRDPQTLEILDITPCSFGGVSVITPGTNTSNQVAVLYQGVNCTEVPVAIHA
DQLTPTWRVYSTGSNVFQTRAGCLIGAEHVNNSYECDIPIGAGICASYQTQTNSPGSASS
VASQSIIAYTMSLGAENSVAYSNNSIAIPTNFTISVTTEIIPVSMPKTSVDCTMYICGDS
TECSNLLLQYGSFCTQLNRALTEIAVEQDKNTQEVFAQVKQIYKTPPIKDFGGFNFSQIL
PDPSKPSKRSFIEDLLFNKVTLADAGFIKGYGCCLGDIAARDLICAQKFNGLTVLCPLLT
DEMIAAYTSALLAGTITAGWTFGAGAALQIPFAMQMAYRFNGIGVTQNVLYENQKLIANQ
FNKAIGKIQDGLSSTASALGKLQDVVNQNAQALNTLVKQLSSNFGAISSVLNDILSRLDP
PEAEVQIDRLINGRLQSLQTYVTQQLIRAAEIRASANLAAEKMSECVLGQSKRVDFCGKG
YHLMSFPQSAPHGVVFLHVTYVPTQHKNFTTAPAICHDGKAHFPREGVFVSNGTHWFVTQ
RNFYEPQIITTDNTFVSGNCDVVIGIVNNTVYDPLQPELDS
SEQ ID NO: 54-(CoV2_S2_1_hbnet_pross_openDS2 , SEQ ID NO: 30 as parent)
mutant Spike (S) protein amino acid sequence:
AYTNSFTRGVYYPDKVFRSSVLHSTQDLFLPFFSNVTWFHAIHVSGTNGTKRFDNPVLPF
NDGVYFASTEKSNIIRGWIFGTTLDSKTQSLLIVNNATNVVIKVCEFQFCNDPFLGVYYH
KNNKSWMESEFRVYSSANNCTFEYVSQPFLMDLEGKQGNFKNLREFVFKNIDGYFKIYSK
HTPINLVRDLPQGFSALEPLVDLPIGINITRFQTLLALHRSYLTPGDSSSGWTAGAAAYY
VGYLQPRTFLLKYNENGTITDAVDCALDPLSETKCTLKSFTVEKGIYQTSNFRVQPTESI
VRFPNITNLCPFGEVFNATRFASVYAWNRKRISNCVADYSVLYNSASFSTFKCYGVSPTK
LNDLCFTNVYADSFVIRGDEVRQIAPGQTGKIADYNYKLPDDFTGCVIAWNSNNLDSKVG
GNYNYLYRLFRKSNLKPFERDISTEIYQAGSTPCNGVEGFNCYFPLQSYGFQPTNGVGYQ
PYRVVVLSFELLHAPATVCGPKKSTNLVKNKCVNFNFNGLTGTGVLTESNKKFLPFQQFG
RDIADTTDAVRDPQTLEILDITPCSFGGVSVITPGTNTSNQVAVLYQGVNCTEVPVAIHA
DQLTPTWRVYSTGSNVFQTRAGCLIGAEHVNNSYECDIPIGAGICASYQTQTNSPGSASS
VASQSIIAYTMSLGAENSVAYSNNSIAIATNFTISVTTEILPVSMTKTSVDCTMYICGGS
TECSNLLLQYGSFCTQLNRALTEIAVEQDKNTQEVFAQVKQIYKTPPIKDFGGFNFSQIL
PDPSKPSKRSAIEDLLFNKVKLADAGFIKGYGCCLGDIAARDSICAQKFNGLTILCSLLT
DEMIAAFTSALLAGTITAGWTFGAGAALQIPFAMQMAYRFAGIGVTQNVLYENQKLIANQ
FNNAIGKIQDGLSSTASALGKLQDVVNQNAQALNTLVKQLSSNFGAISSVLNDILSNLDP
PEAEVQIDRLITGRLQSLQTYVTQQAIRAAEIRASANLAATKMSECVLGQSKLVDFCGKG
YHLMSFPQSAPHGVVFLHVTYVATQYKNFTTAPAICHDGKAHFPREGVFVSNGTHWFVTQ
RNFYEPQIITTDLTFVSGNCDVVIGIVNNTVYDPLQPELDS
SEQ ID NO: 55-(CoV2_S_1_hbnet_openDS3, SEQ ID NO: 5 as parent) mutant Spike
(S) protein amino acid sequence:
AYTNSFTRGVYYPDKVSMSSVLHSTQDLFLPFFSNVTWFHAIHVSGTNGTKRFDNPVLPF
NDGVYFASTEKSNIIRGWIFGTTLDSKTOSLLIVNNATNVVIKVCEFQFCNDPFLGVYYH
KNNKSWMESEFRVYSSANNCTFEYVSQPFLMDLEGKQGNFKNLREEVFKNIDGYFKIYSK
HTPINLVRDLPQGFSALELLVDLPIGINITRFQTLLALHRSYLTPGDSSSGWTAGAAAYY
VGYLQPRTFLLKYNENGVITDAVDCALDPLSETKCTLKSFTVEKGIYITSLFEVQPTESI
VRFPNITNLCPFGEVFNATRFASVYAWNRKRISNCVADYSVLYNSASFSTFKCYGVSPTK
LNDLCFTNVYADSFVIRGDEVRQIAPGQTGKIADYNYKLPDDFTGCVIAWNSNNLDSKVG
GNYNYLYRLFRKSNLKPFERDISTEIYQAGSTPCNGVEGFNCYFPLQSYGFQPTNGVGYQ
PYRVVVLSFELNHAPATVCGPKKSTNLVKNKCVNFNFNGLTGTGVLTESNLKFVSTQLFR
VHSCNTTLAVRDPQTLEILDIVSCSSGAVSVITPGTNTSNQVAVLYYNVWCTEVPVAIHA
DQLTPTWRVYSTGSNVFQTKAGCLIGAEHVNNSYECDIAIGGGICASYQTQTNSPGSASS
VASQSIIAYWISTGSWNSVDNSNDAIAIATNFTISVTTEILPVSMTKTWVICTLYICGGS
TECSNLLAQYGSFCTELNRALTGIAVEQDKNTWEVFAQVRTIFHTPSIKDFGGFNFSQIL
PDPSKPSKRSFIEDLLFNKVTLADAGFIKQYGDCLGDIAARDLSCHQDSRGLNILSSLLT
DELIAEFTSALLAGTITAGWSFTAGHALNIPWAVQMAWRFAGIGVTENVLAKNQKLIANQ
FNSAIGKIQDSLSSTASALGKLQDVVNQNAQALDELERELCSNFGAISSVLNDILSNLDP
PEAEVQIDRLILGRLMALAAFVTAQLIRAAEIRASANLAATKMAECVAGQSKLVGFCGEG
WHLMSFPQSAPHGVVFLHVTLVAGQTKNFTTALAICHDGKAHIPRNGVFVSNGTHWFVTQ
EQFYEPLIITTDLVLVSGNCDDVIGIVNNTVYDPKQPELDS
SEQ ID NO: 56-(CoV2_S2_1_hbnet_openDS3, SEQ ID NO: 10 as parent) mutant
Spike (S) protein amino acid sequence:
AYTNSFTRGVYYPDKVFRSSVLHSTQDLFLPFFSNVTWFHAIHVSGTNGTKRFDNPVLPF
NDGVYFASTEKSNIIRGWIFGTTLDSKTQSLLIVNNATNVVIKVCEFQFCNDPFLGVYYH
KNNKSWMESEFRVYSSANNCTFEYVSQPFLMDLEGKQGNFKNLREFVFKNIDGYFKIYSK
HTPINLVRDLPQGFSALEPLVDLPIGINITRFQTLLALHRSYLTPGDSSSGWTAGAAAYY
VGYLQPRTFLLKYNENGTITDAVDCALDPLSETKCTLKSFTVEKGIYQTSNFRVQPTESI
VRFPNITNLCPFGEVFNATRFASVYAWNRKRISNCVADYSVLYNSASFSTFKCYGVSPTK
LNDLCFTNVYADSFVIRGDEVRQIAPGQTGKIADYNYKLPDDFTGCVIAWNSNNLDSKVG
GNYNYLYRLFRKSNLKPFERDISTEIYQAGSTPCNGVEGFNCYFPLQSYGFQPTNGVGYQ
PYRVVVLSFELLHAPATVCGPKKSTNLVKNKCVNFNFNGLTGTGVLTESNKKFLPFQQFG
RDICDTTDAVRDPQTLEILDITPCSFGGVSVITPGTNTSNQVAVLYQGVNCTEVPVAIHA
DQLTPTWRVYSTGSNVFQTRAGCLIGAEHVNNSYECDIPIGAGICASYQTQTNSPGSASS
VASQSIIAYQISTGSWNSVENSNDAIAIATNFTISVTTEILPVSMTKTWVDCTLYICGGS
TECSNLLAQYGSFCTELNRMLTGIAVEQDKNTWEVFATVRTIFHTPSIKDFGGFNFSQIL
PDPSKPSKRSFIEDLLFNKVTLADAGFIKQYGDCLGDIAARDSSCAQKANGLNILSSLLT
DELIAEFTSALLAGTITAGWSFTAGAALNIPWWAQMAWRFAGIGVTENVLAKNQKLIANQ
FNSAIGKIQDSLSSTASALGKLQDVVNQNAQALAELEKELCSNFGAISSVLNDILSNLDP
PEAEVQIDRLILGRLMALAAFVTAQAIRAAEIRASANLAATKMRECVAGQSKLVGFCGEG
WHLMSFPQSAPHGVVFLHVTLVAGQYKNFTTAPAICHDGKAHIPRNGVFVSNGTHWFVTQ
EQFYEPLIITTDLVLVSGNCDDVIGIVNNTVYDPKQPELDS
SEQ ID NO: 57-(CoV2_S2_NTD_6_pross_openDS3, SEQ ID NO: 24 as parent) mutant
Spike (S) protein amino acid sequence:
AYTNSFTRGVYYPDKVFRSNVLHLTQDLFLPFFSNVTWFHAIHVSGTNGTKRFDNPVLPF
NDGVYFASTEKSNIIRGWIFGTTLDSKTQSLLIVNNATNVVIKVCEFQFCEDPFLGVYYH
KNNKSWMESEFHVYSSANNCTFEYVSQPFLMDLEGKQGNFKNLREFVFKNIDGYFKIYSK
HTPINLVRDLPQGFSALEPLVDLPIGINITRFQILLALHRSYLTPGDSSSGWTAGAAAYY
VGYLQPRTFLLKYNENGTITDAVDCALDPLSETKCTLKSFTVEKGIYQTSNFRVQPTESI
VRFPNITNLCPFGEVFNATRFASVYAWNRKRISNCVADYSVLYNSASFSTFKCYGVSPTK
LNDLCFTNVYADSFVIRGDEVRQIAPGQTGKIADYNYKLPDDFTGCVIAWNSNNLDSKVG
GNYNYLYRLFRKSNLKPFERDISTEIYQAGSTPCNGVEGFNCYFPLQSYGFQPTNGVGYQ
PYRVVVLSFELLHAPATVCGPKKSTNLVKNKCVNFNFNGLTGTGVLTESNKKFLPFQQFG
RDICDTTDAVRDPQTLEILDITPCSFGGVSVITPGTNTSNQVAVLYQGVNCTEVPVAIHA
DQLTPTWRVYSTGSNVFQTRAGCLIGAEHVNNSYECDIPIGAGICASYQTQTNSPGSASS
VASQSIIAYTMSLGAENSVAYSNNSIAIPTNFTISVTTEIIPVSMPKTSVDCTMYICGDS
TECSNLLLQYGSFCTQLNRALTEIAVEQDKNTQEVFAQVKQIYKTPPIKDFGGFNFSQIL
PDPSKPSKRSFIEDLLFNKVTLADAGFIKGYGDCLGDIAARDLICAQKFNGLTVLPPLLT
DEMIAAYTSALLAGTITAGWTFGAGAALQIPFAMQMAYRFNGIGVTQNVLYENQKLIANQ
FNKAIGKIODGLSSTASALGKLQDVVNONAOALNTLVKQLCSNFGAISSVLNDILSRLDP
PEAEVQIDRLINGRLQSLQTYVTQQLIRAAEIRASANLAAEKMSECVLGQSKRVDFCGKG
YHLMSFPQSAPHGVVFLHVTYVPTQHKNFTTAPAICHDGKAHFPREGVFVSNGTHWFVTQ
RNFYEPQIITTDNTFVSGNCDVVIGIVNNTVYDPLQPELDS
SEQ ID NO: 58-(CoV2_S2_6_pross_openDS3, SEQ ID NO: 29 as parent) mutant
Spike (S) protein amino acid sequence:
AYTNSFTRGVYYPDKVFRSSVLHSTQDLFLPFFSNVTWFHAIHVSGTNGTKRFDNPVLPF
NDGVYFASTEKSNIIRGWIFGTTLDSKTQSLLIVNNATNVVIKVCEFQFCNDPFLGVYYH
KNNKSWMESEFRVYSSANNCTFEYVSQPFLMDLEGKQGNFKNLREFVFKNIDGYFKIYSK
HTPINLVRDLPQGFSALEPLVDLPIGINITRFQTLLALHRSYLTPGDSSSGWTAGAAAYY
VGYLQPRTFLLKYNENGTITDAVDCALDPLSETKCTLKSFTVEKGIYQTSNFRVQPTESI
VRFPNITNLCPFGEVFNATRFASVYAWNRKRISNCVADYSVLYNSASFSTFKCYGVSPTK
LNDLCFTNVYADSFVIRGDEVRQIAPGQTGKIADYNYKLPDDFTGCVIAWNSNNLDSKVG
GNYNYLYRLFRKSNLKPFERDISTEIYQAGSTPCNGVEGFNCYFPLQSYGFQPTNGVGYQ
PYRVVVLSFELLHAPATVCGPKKSTNLVKNKCVNFNFNGLTGTGVLTESNKKFLPFQQFG
RDICDTTDAVRDPQTLEILDITPCSFGGVSVITPGTNTSNQVAVLYQGVNCTEVPVAIHA
DQLTPTWRVYSTGSNVFQTRAGCLIGAEHVNNSYECDIPIGAGICASYQTQTNSPGSASS
VASQSIIAYTMSLGAENSVAYSNNSIAIPTNFTISVTTEI1PVSMPKTSVDCTMYICGDS
TECSNLLLQYGSFCTQLNRALTEIAVEQDKNTQEVFAQVKQIYKTPPIKDFGGFNFSQIL
PDPSKPSKRSFIEDLLFNKVTLADAGFIKGYGDCLGDIAARDLICAQKFNGLTVLPPLLT
DEMIAAYTSALLAGTITAGWTFGAGAALQIPFAMQMAYRFNGIGVTQNVLYENQKLIANQ
FNKAIGKIQDGLSSTASALGKLQDVVNQNAQALNTLVKQLCSNFGAISSVLNDILSRLDP
PEAEVQIDRLINGRLQSLQTYVTQQLIRAAEIRASANLAAEKMSECVLGQSKRVDFCGKG
YHLMSFPQSAPHGVVFLHVTYVPTQHKNFTTAPAICHDGKAHFPREGVFVSNGTHWFVTQ
RNFYEPQIITTDNTFVSGNCDVVIGIVNNTVYDPLQPELDS
SEQ ID NO: 59-(CoV2_S2_1_hbnet_pross_openDS3, SEQ ID NO: 30 as parent)
mutant Spike (S) protein amino acid sequence:
AYTNSFTRGVYYPDKVFRSSVLHSTQDLFLPFFSNVTWFHAIHVSGTNGTKRFDNPVLPF
NDGVYFASTEKSNIIRGWIFGTTLDSKTQSLLIVNNATNVVIKVCEFQFCNDPFLGVYYH
KNNKSWMESEFRVYSSANNCTFEYVSQPFLMDLEGKQGNFKNLREFVFKNIDGYFKIYSK
HTPINLVRDLPQGFSALEPLVDLPIGINITRFQTLLALHRSYLTPGDSSSGWTAGAAAYY
VGYLQPRTFLLKYNENGTITDAVDCALDPLSETKCTLKSFTVEKGIYQTSNFRVQPTESI
VRFPNITNLCPFGEVFNATRFASVYAWNRKRISNCVADYSVLYNSASFSTFKCYGVSPTK
LNDLCFTNVYADSFVIRGDEVRQIAPGQTGKIADYNYKLPDDFTGCVIAWNSNNLDSKVG
GNYNYLYRLFRKSNLKPFERDISTEIYQAGSTPCNGVEGFNCYFPLQSYGFQPTNGVGYQ
PYRVVVLSFELLHAPATVCGPKKSTNLVKNKCVNFNFNGLTGTGVLTESNKKFLPFQQFG
RDICDTTDAVRDPQTLEILDITPCSFGGVSVITPGTNTSNQVAVLYQGVNCTEVPVAIHA
DQLTPTWRVYSTGSNVFQTRAGCLIGAEHVNNSYECDIPIGAGICASYQTQTNSPGSASS
VASQSIIAYTMSLGAENSVAYSNNSIAIATNFTISVTTEILPVSMTKTSVDCTMYICGGS
TECSNLLLQYGSFCTQLNRALTEIAVEQDKNTQEVFAQVKQIYKTPPIKDFGGFNFSQIL
PDPSKPSKRSAIEDLLFNKVKLADAGFIKGYGDCLGDIAARDSICAQKFNGLTILSSLLT
DEMIAAFTSALLAGTITAGWTFGAGAALQIPFAMQMAYRFAGIGVTQNVLYENQKLIANQ
FNNAIGKIQDGLSSTASALGKLQDVVNQNAQALNTLVKQLCSNFGAISSVLNDILSNLDP
PEAEVQIDRLITGRLQSLQTYVTQQAIRAAEIRASANLAATKMSECVLGQSKLVDFCGKG
YHLMSFPQSAPHGVVFLHVTYVATQYKNFTTAPAICHDGKAHFPREGVFVSNGTHWFVTQ
RNFYEPQIITTDLTFVSGNCDVVIGIVNNTVYDPLQPELDS
SEQ ID NO: 60-(CoV2_S_1_hbnet_openDS4, SEQ ID NO: 5 as parent) mutant Spike
(S) protein amino acid sequence:
AYTNSFTRGVYYPDKVSMSSVLHSTQDLFLPFFSNVTWFHAIHVSGTNGTKRFDNPVLPF
NDGVYFASTEKSNIIRGWIFGTTLDSKTQSLLIVNNATNVVIKVCEFQFCNDPFLGVYYH
KNNKSWMESEFRVYSSANNCTFEYVSQPFLMDLEGKQGNFKNLREFVFKNIDGYFKIYSK
HTPINLVRDLPQGFSALELLVDLPIGINITRFQTLLALHRSYLTPGDSSSGWTAGAAAYY
VGYLQPRTFLLKYNENGVITDAVDCALDPLSETKCTLKSFTVEKGIYITSLFEVQPTESI
VRFPNITNLCPFGEVFNATRFASVYAWNRKRISNCVADYSVLYNSASFSTFKCYGVSPTK
LNDLCFTNVYADSFVIRGDEVRQIAPGQTGKIADYNYKLPDDFTGCVIAWNSNNLDSKVG
GNYNYLYRLFRKSNLKPFERDISTEIYQAGSTPCNGVEGENCYFPLQSYGFQPTNGVGYQ
PYRVVVLSFELNHAPATVCGPKKSTNLVKNKCVNFNFNGLTGTGVLTESNLKFVSTQLFR
VHSANTTLAVRDPQTLEILCIVSCSSGAVSVITPGTNTSNQVAVLYYNVWCTEVPVAIHA
DQLTPTWRVYSTGSNVFQTKAGCLIGAEHVNNSYECDIAIGGGICASYQTQTNSPGSASS
VASQSIIAYWISTGSWNSVDNSNDAIAIATNFTISVTTEILPVSMTKTWVICTLYICGGS
TECSNLLAQYGSFCTELNRALTGIAVEQDKNTWEVFAQVRTIFHTPSIKDFGGFNFSQIL
PDPSKPSKRSFIEDLLFNKVTLADAGFIKQYGDCLGDIAARDLCCHQDSRGLNILSSLLT
DELIAEFTSALLAGTITAGWSFTAGHALNIPWAVQMAWRFAGIGVTENVLAKNQKLIANQ
FNSAIGKIQDSLSSTASALGKLQDVVNQNAQALDELERELSSNFGAISSVLNDILSNLDP
PEAEVQIDRLILGRLMALAAFVTAQLIRAAEIRASANLAATKMAECVAGQSKLVGFCGEG
WHLMSFPQSAPHGVVFLHVTLVAGQTKNFTTALAICHDGKAHIPRNGVFVSNGTHWFVTQ
EQFYEPLIITTDLVLVSGNCDDVIGIVNNTVYDPKQPELDS
SEQ ID NO: 61-(CoV2_S2_1_hbnet_openDS4, SEQ ID NO: 10 as parent) mutant
Spike (S) protein amino acid sequence:
AYTNSFTRGVYYPDKVFRSSVLHSTQDLFLPFFSNVTWFHAIHVSGTNGTKRFDNPVLPF
NDGVYFASTEKSNIIRGWIFGTTLDSKTQSLLIVNNATNVVIKVCEFQFCNDPFLGVYYH
KNNKSWMESEFRVYSSANNCTFEYVSQPFLMDLEGKQGNFKNLREFVFKNIDGYFKIYSK
HTPINLVRDLPQGFSALEPLVDLPIGINITRFQTLLALHRSYLTPGDSSSGWTAGAAAYY
VGYLQPRTFLLKYNENGTITDAVDCALDPLSETKCTLKSFTVEKGIYQTSNFRVQPTESI
VRFPNITNLCPFGEVFNATRFASVYAWNRKRISNCVADYSVLYNSASFSTFKCYGVSPTK
LNDLCFTNVYADSFVIRGDEVRQIAPGQTGKIADYNYKLPDDFTGCVIAWNSNNLDSKVG
GNYNYLYRLFRKSNLKPFERDISTEIYQAGSTPCNGVEGFNCYFPLQSYGFQPTNGVGYQ
PYRVVVLSFELLHAPATVCGPKKSTNLVKNKCVNFNFNGLTGTGVLTESNKKFLPFQQFG
RDIADTTDAVRDPQTLEILCITPCSFGGVSVITPGTNTSNQVAVLYQGVNCTEVPVAIHA
DQLTPTWRVYSTGSNVFQTRAGCLIGAEHVNNSYECDIPIGAGICASYQTQTNSPGSASS
VASQSIIAYQISTGSWNSVENSNDAIAIATNFTISVTTEILPVSMTKTWVDCTLYICGGS
TECSNLLAQYGSFCTELNRMLTGIAVEQDKNTWEVFATVRTIFHTPSIKDFGGFNFSQIL
PDPSKPSKRSFIEDLLFNKVTLADAGFIKQYGDCLGDIAARDSCCAQKANGLNILSSLLT
DELIAEFTSALLAGTITAGWSFTAGAALNIPWWAQMAWRFAGIGVTENVLAKNQKLIANQ
FNSAIGKIQDSLSSTASALGKLQDVVNQNAQALAELEKELSSNFGAISSVLNDILSNLDP
PEAEVQIDRLILGRLMALAAFVTAQAIRAAEIRASANLAATKMRECVAGQSKLVGFCGEG
WHLMSFPQSAPHGVVFLHVTLVAGQYKNFTTAPAICHDGKAHIPRNGVFVSNGTHWFVTQ
EQFYEPLIITTDLVLVSGNCDDVIGIVNNTVYDPKQPELDS
SEQ ID NO: 62-(CoV2_S2_NTD_6_pross_openDS4, SEQ ID NO: 24 as parent) mutant
Spike (S) protein amino acid sequence:
AYTNSFTRGVYYPDKVFRSNVLHLTQDLFLPFFSNVTWFHAIHVSGTNGTKRFDNPVLPF
NDGVYFASTEKSNIIRGWIFGTTLDSKTQSLLIVNNATNVVIKVCEFQFCEDPFLGVYYH
KNNKSWMESEFHVYSSANNCTFEYVSQPFLMDLEGKQGNFKNLREFVFKNIDGYFKIYSK
HTPINLVRDLPQGFSALEPLVDLPIGINITRFQILLALHRSYLTPGDSSSGWTAGAAAYY
VGYLQPRTFLLKYNENGTITDAVDCALDPLSETKCTLKSFTVEKGIYQTSNFRVQPTESI
VRFPNITNLCPFGEVFNATRFASVYAWNRKRISNCVADYSVLYNSASFSTFKCYGVSPTK
LNDLCFTNVYADSFVIRGDEVRQIAPGQTGKIADYNYKLPDDFTGCVIAWNSNNLDSKVG
GNYNYLYRLFRKSNLKPFERDISTEIYQAGSTPCNGVEGFNCYFPLQSYGFQPTNGVGYQ
PYRVVVLSFELLHAPATVCGPKKSTNLVKNKCVNFNFNGLTGTGVLTESNKKFLPFQQFG
RDIADTTDAVRDPQTLEILCITPCSFGGVSVITPGTNTSNQVAVLYQGVNCTEVPVAIHA
DQLTPTWRVYSTGSNVFQTRAGCLIGAEHVNNSYECDIPIGAGICASYQTQTNSPGSASS
VASQSIIAYTMSLGAENSVAYSNNSIAIPTNFTISVTTEIIPVSMPKTSVDCTMYICGDS
TECSNLLLQYGSFCTQLNRALTEIAVEQDKNTQEVFAQVKQIYKTPPIKDFGGFNFSQIL
PDPSKPSKRSFIEDLLFNKVTLADAGFIKGYGDCLGDIAARDLCCAQKFNGLTVLPPLLT
DEMIAAYTSALLAGTITAGWTFGAGAALQIPFAMQMAYRFNGIGVTQNVLYENQKLIANQ
FNKAIGKIQDGLSSTASALGKLQDVVNQNAQALNTLVKQLSSNFGAISSVLNDILSRLDP
PEAEVQIDRLINGRLQSLQTYVTQQLIRAAEIRASANLAAEKMSECVLGQSKRVDFCGKG
YHLMSFPQSAPHGVVFLHVTYVPTQHKNFTTAPAICHDGKAHFPREGVFVSNGTHWFVTQ
RNFYEPQIITTDNTFVSGNCDVVIGIVNNTVYDPLQPELDS
SEQ ID NO: 63-(CoV2_S2_6_pross_openDS4, SEQ ID NO: 29 as parent) mutant
Spike (S) protein amino acid sequence:
AYTNSETRGVYYPDKVFRSSVLHSTQDLFLPFFSNVTWFHAIHVSGTNGTKRFDNPVLPE
NDGVYFASTEKSNIIRGWIFGTTLDSKTQSLLIVNNATNVVIKVCEFQFCNDPFLGVYYH
KNNKSWMESEFRVYSSANNCTFEYVSQPFLMDLEGKQGNFKNLREFVFKNIDGYFKIYSK
HTPINLVRDLPQGFSALEPLVDLPIGINITRFQTLLALHRSYLTPGDSSSGWTAGAAAYY
VGYLQPRTFLLKYNENGTITDAVDCALDPLSETKCTLKSFTVEKGIYQTSNFRVQPTESI
VRFPNITNLCPFGEVFNATRFASVYAWNRKRISNCVADYSVLYNSASFSTFKCYGVSPTK
LNDLCFTNVYADSFVIRGDEVRQIAPGQTGKIADYNYKLPDDFTGCVIAWNSNNLDSKVG
GNYNYLYRLFRKSNLKPFERDISTEIYQAGSTPCNGVEGFNCYFPLQSYGFQPTNGVGYQ
PYRVVVLSFELLHAPATVCGPKKSTNLVKNKCVNFNFNGLTGTGVLTESNKKFLPFQQFG
RDIADTTDAVRDPQTLEILCITPCSFGGVSVITPGTNTSNQVAVLYQGVNCTEVPVAIHA
DQLTPTWRVYSTGSNVFQTRAGCLIGAEHVNNSYECDIPIGAGICASYQTQTNSPGSASS
VASQSIIAYTMSLGAENSVAYSNNSIAIPTNFTISVTTEIIPVSMPKTSVDCTMYICGDS
TECSNLLLQYGSFCTQLNRALTEIAVEQDKNTQEVFAQVKQIYKTPPIKDFGGFNFSQIL
PDPSKPSKRSFIEDLLFNKVTLADAGFIKGYGDCLGDIAARDLCCAQKFNGLTVLPPLLT
DEMIAAYTSALLAGTITAGWTFGAGAALQIPFAMQMAYRFNGIGVTQNVLYENQKLIANQ
FNKAIGKIQDGLSSTASALGKLQDVVNQNAQALNTLVKQLSSNFGAISSVLNDILSRLDP
PEAEVQIDRLINGRLQSLQTYVTQQLIRAAEIRASANLAAEKMSECVLGQSKRVDFCGKG
YHLMSFPQSAPHGVVFLHVTYVPTQHKNFTTAPAICHDGKAHFPREGVFVSNGTHWFVTQ
RNFYEPQIITTDNTFVSGNCDVVIGIVNNTVYDPLQPELDS
SEQ ID NO: 64-(CoV2_S2_1_hbnet_pross_openDS4, SEQ ID NO: 30 as parent)
mutant Spike (S) protein amino acid sequence:
AYTNSFTRGVYYPDKVFRSSVLHSTQDLFLPFFSNVTWFHAIHVSGTNGTKRFDNPVLPF
NDGVYFASTEKSNIIRGWIFGTTLDSKTQSLLIVNNATNVVIKVCEFQFCNDPFLGVYYH
KNNKSWMESEFRVYSSANNCTFEYVSQPFLMDLEGKQGNFKNLREFVFKNIDGYFKIYSK
HTPINLVRDLPQGFSALEPLVDLPIGINITRFQTLLALHRSYLTPGDSSSGWTAGAAAYY
VGYLQPRTFLLKYNENGTITDAVDCALDPLSETKCTLKSFTVEKGIYQTSNFRVQPTESI
VRFPNITNLCPFGEVFNATRFASVYAWNRKRISNCVADYSVLYNSASFSTFKCYGVSPTK
LNDLCFTNVYADSFVIRGDEVRQIAPGQTGKIADYNYKLPDDFTGCVIAWNSNNLDSKVG
GNYNYLYRLFRKSNLKPFERDISTEIYQAGSTPCNGVEGFNCYFPLQSYGFQPTNGVGYQ
PYRVVVLSFELLHAPATVCGPKKSTNLVKNKCVNFNFNGLTGTGVLTESNKKFLPFQQFG
RDIADTTDAVRDPQTLEILCITPCSFGGVSVITPGTNTSNQVAVLYQGVNCTEVPVAIHA
DQLTPTWRVYSTGSNVFQTRAGCLIGAEHVNNSYECDIPIGAGICASYQTQTNSPGSASS
VASQSIIAYTMSLGAENSVAYSNNSIAIATNFTISVTTEILPVSMTKTSVDCTMYICGGS
TECSNLLLQYGSFCTQLNRALTEIAVEQDKNTQEVFAQVKQIYKTPPIKDFGGFNFSQIL
PDPSKPSKRSAIEDLLFNKVKLADAGFIKGYGDCLGDIAARDSCCAQKFNGLTILSSLLT
DEMIAAFTSALLAGTITAGWTFGAGAALQIPFAMQMAYRFAGIGVTQNVLYENQKLIANQ
FNNAIGKIQDGLSSTASALGKLQDVVNQNAQALNTLVKQLSSNFGAISSVLNDILSNLDP
PEAEVQIDRLITGRLQSLQTYVTQQAIRAAEIRASANLAATKMSECVLGQSKLVDFCGKG
YHLMSFPQSAPHGVVFLHVTYVATQYKNFTTAPAICHDGKAHFPREGVFVSNGTHWFVTQ
RNFYEPQIITTDLTFVSGNCDVVIGIVNNTVYDPLQPELDS
SEQ ID NO: 65-(CoV2_RBD_K417F_K391F) mutant Spike (S) protein amino acid
sequence:
AYTNSFTRGVYYPDKVFRSSVLHSTQDLFLPFFSNVTWFHAIHVSGTNGTKRFDNPVLPF
NDGVYFASTEKSNIIRGWIFGTTLDSKTQSLLIVNNATNVVIKVCEFQFCNDPFLGVYYH
KNNKSWMESEFRVYSSANNCTFEYVSQPFLMDLEGKQGNFKNLREFVFKNIDGYFKIYSK
HTPINLVRDLPQGFSALEPLVDLPIGINITRFQTLLALHRSYLTPGDSSSGWTAGAAAYY
VGYLQPRTFLLKYNENGTITDAVDCALDPLSETKCTLKSFTVEKGIYQTSNFRVQPTESI
VRFPNITNLCPFGEVFNATRFASVYAWNRKRISNCVADYSVLYNSASFSTFKCYGVSPTK
LNDLCFTNVYADSFVIRGDEVRQIAPGQTGFIADYNYKLPDDFTGCVIAWNSNNLDSKVG
GNYNYLYRLFRKSNLKPFERDISTEIYQAGSTPCNGVEGFNCYFPLQSYGFQPTNGVGYQ
PYRVVVLSFELLHAPATVCGPKKSTNLVKNKCVNFNFNGLTGTGVLTESNKKFLPFQQFG
RDIADTTDAVRDPQTLEILDITPCSFGGVSVITPGTNTSNQVAVLYQGVNCTEVPVAIHA
DQLTPTWRVYSTGSNVFQTRAGCLIGAEHVNNSYECDIPIGAGICASYQTQTNSPGSASS
VASQSIIAYTMSLGAENSVAYSNNSIAIPTNFTISVTTEILPVSMTKTSVDCTMYICGDS
TECSNLLLQYGSFCTQLNRALTGIAVEQDKNTQEVFAQVKQIYKTPPIKDFGGFNFSQIL
PDPSKPSKRSFIEDLLFNKVTLADAGFIKQYGDCLGDIAARDLICAQKFNGLTVLPPLLT
DEMIAQYTSALLAGTITSGWTFGAGAALQIPFAMQMAYRFNGIGVTQNVLYENQKLIANQ
FNSAIGKIQDSLSSTASALGKLQDVVNQNAQALNTLVKQLSSNFGAISSVLNDILSRLDP
PEAEVQIDRLITGRLQSLQTYVTQQLIRAAEIRASANLAATKMSECVLGQSKRVDFCGKG
YHLMSFPQSAPHGVVFLHVTYVPAQEKNFTTAPAICHDGKAHFPREGVFVSNGTHWFVTQ
RNFYEPQIITTDNTFVSGNCDVVIGIVNNTVYDPLQPELDS
SEQ ID NO: 66-(CoV2_RBD_K417L_K391L) mutant Spike (S) protein amino acid
sequence:
AYTNSFTRGVYYPDKVFRSSVLHSTQDLFLPFFSNVTWFHAIHVSGTNGTKRFDNPVLPF
NDGVYFASTEKSNIIRGWIFGTTLDSKTQSLLIVNNATNVVIKVCEFQFCNDPFLGVYYH
KNNKSWMESEFRVYSSANNCTFEYVSQPFLMDLEGKQGNFKNLREFVFKNIDGYFKIYSK
HTPINLVRDLPQGFSALEPLVDLPIGINITRFQTLLALHRSYLTPGDSSSGWTAGAAAYY
VGYLQPRTFLLKYNENGTITDAVDCALDPLSETKCTLKSFTVEKGIYQTSNFRVQPTESI
VRFPNITNLCPFGEVFNATRFASVYAWNRKRISNCVADYSVLYNSASFSTFKCYGVSPTK
LNDLCFTNVYADSFVIRGDEVRQIAPGQTGLIADYNYKLPDDFTGCVIAWNSNNLDSKVG
GNYNYLYRLFRKSNLKPFERDISTEIYQAGSTPCNGVEGFNCYFPLQSYGFQPTNGVGYQ
PYRVVVLSFELLHAPATVCGPKKSTNLVKNKCVNFNFNGLTGTGVLTESNKKFLPFQQFG
RDIADTTDAVRDPQTLEILDITPCSFGGVSVITPGTNTSNQVAVLYQGVNCTEVPVAIHA
DQLTPTWRVYSTGSNVFQTRAGCLIGAEHVNNSYECDIPIGAGICASYQTQTNSPGSASS
VASQSIIAYTMSLGAENSVAYSNNSIAIPTNFTISVTTEILPVSMTKTSVDCTMYICGDS
TECSNLLLQYGSFCTQLNRALTGIAVEQDKNTQEVFAQVKQIYKTPPIKDFGGFNFSQIL
PDPSKPSKRSFIEDLLFNKVTLADAGFIKQYGDCLGDIAARDLICAQKFNGLTVLPPLLT
DEMIAQYTSALLAGTITSGWTFGAGAALQIPFAMQMAYRFNGIGVTQNVLYENQKLIANQ
FNSAIGKIQDSLSSTASALGKLQDVVNQNAQALNTLVKQLSSNFGAISSVLNDILSRLDP
PEAEVQIDRLITGRLQSLQTYVTQQLIRAAEIRASANLAATKMSECVLGQSKRVDFCGKG
YHLMSFPQSAPHGVVFLHVTYVPAQEKNFTTAPAICHDGKAHFPREGVFVSNGTHWFVTQ
RNFYEPQIITTDNTFVSGNCDVVIGIVNNTVYDPLQPELDS
SEQ ID NO: 67-(CoV2_RBD_K417M_K391M) mutant Spike (S) protein amino acid
sequence:
AYTNSFTRGVYYPDKVFRSSVLHSTQDLFLPFFSNVTWFHAIHVSGTNGTKRFDNPVLPF
NDGVYFASTEKSNIIRGWIFGTTLDSKTQSLLIVNNATNVVIKVCEFQFCNDPFLGVYYH
KNNKSWMESEFRVYSSANNCTFEYVSQPFLMDLEGKQGNFKNLREFVFKNIDGYFKIYSK
HTPINLVRDLPQGFSALEPLVDLPIGINITRFQTLLALHRSYLTPGDSSSGWTAGAAAYY
VGYLQPRTFLLKYNENGTITDAVDCALDPLSETKCTLKSFTVEKGIYQTSNFRVQPTESI
VRFPNITNLCPFGEVFNATRFASVYAWNRKRISNCVADYSVLYNSASFSTFKCYGVSPTK
LNDLCFTNVYADSFVIRGDEVRQIAPGQTGMIADYNYKLPDDFTGCVIAWNSNNLDSKVG
GNYNYLYRLFRKSNLKPFERDISTEIYQAGSTPCNGVEGFNCYFPLQSYGFQPTNGVGYQ
PYRVVVLSFELLHAPATVCGPKKSTNLVKNKCVNFNFNGLTGTGVLTESNKKFLPFQQFG
RDIADTTDAVRDPQTLEILDITPCSFGGVSVITPGTNTSNQVAVLYQGVNCTEVPVAIHA
DQLTPTWRVYSTGSNVFQTRAGCLIGAEHVNNSYECDIPIGAGICASYQTQTNSPGSASS
VASQSIIAYTMSLGAENSVAYSNNSIAIPTNFTISVTTEILPVSMTKTSVDCTMYICGDS
TECSNLLLQYGSFCTQLNRALTGIAVEQDKNTQEVFAQVKQIYKTPPIKDFGGFNFSQIL
PDPSKPSKRSFIEDLLFNKVTLADAGFIKQYGDCLGDIAARDLICAQKFNGLTVLPPLLT
DEMIAQYTSALLAGTITSGWTFGAGAALQIPFAMQMAYRFNGIGVTQNVLYENQKLIANQ
FNSAIGKIQDSLSSTASALGKLQDVVNQNAQALNTLVKQLSSNFGAISSVLNDILSRLDP
PEAEVQIDRLITGRLQSLQTYVTQQLIRAAEIRASANLAATKMSECVLGQSKRVDFCGKG
YHLMSFPQSAPHGVVFLHVTYVPAQEKNFTTAPAICHDGKAHFPREGVFVSNGTHWFVTQ
RNFYEPQIITTDNTFVSGNCDVVIGIVNNTVYDPLQPELDS
SEQ ID NO: 68-(CoV2_RBD_K417W_K391W) mutant Spike (S) protein amino acid
sequence:
AYTNSFTRGVYYPDKVFRSSVLHSTQDLFLPFFSNVTWFHAIHVSGTNGTKRFDNPVLPF
NDGVYFASTEKSNIIRGWIFGTTLDSKTQSLLIVNNATNWIKVCEFQFCNDPFLGVYYH
KNNKSWMESEFRVYSSANNCTFEYVSQPFLMDLEGKQGNFKNLREFVFKNIDGYFKIYSK
HTPINLVRDLPQGFSALEPLVDLPIGINITRFQTLLALHRSYLTPGDSSSGWTAGAAAYY
VGYLQPRTFLLKYNENGTITDAVDCALDPLSETKCTLKSFTVEKGIYQTSNFRVQPTESI
VRFPNITNLCPFGEVFNATRFASVYAWNRKRISNCVADYSVLYNSASFSTFKCYGVSPTK
LNDLCFTNVYADSFVIRGDEVRQIAPGQTGWIADYNYKLPDDFTGCVIAWNSNNLDSKVG
GNYNYLYRLFRKSNLKPFERDISTEIYQAGSTPCNGVEGENCYFPLQSYGFQPTNGVGYQ
PYRVVVLSFELLHAPATVCGPKKSTNLVKNKCVNFNFNGLTGTGVLTESNKKFLPFQQFG
RDIADTTDAVRDPQTLEILDITPCSFGGVSVITPGTNTSNQVAVLYQGVNCTEVPVAIHA
DQLTPTWRVYSTGSNVFQTRAGCLIGAEHVNNSYECDIPIGAGICASYQTQTNSPGSASS
VASQSIIAYTMSLGAENSVAYSNNSIAIPTNFTISVTTEILPVSMTKTSVDCTMYICGDS
TECSNLLLQYGSFCTQLNRALTGIAVEQDKNTQEVFAQVKQIYKTPPIKDFGGFNFSQIL
PDPSKPSKRSFIEDLLFNKVTLADAGFIKQYGDCLGDIAARDLICAQKFNGLTVLPPLLT
DEMIAQYTSALLAGTITSGWTFGAGAALQIPFAMQMAYRFNGIGVTQNVLYENQKLIANQ
FNSAIGKIQDSLSSTASALGKLQDVVNQNAQALNTLVKQLSSNFGAISSVLNDILSRLDP
PEAEVQIDRLITGRLQSLQTYVTQQLIRAAEIRASANLAATKMSECVLGQSKRVDFCGKG
YHLMSFPQSAPHGVVFLHVTYVPAQEKNFTTAPAICHDGKAHFPREGVFVSNGTHWFVTQ
RNFYEPQIITTDNTFVSGNCDVVIGIVNNTVYDPLQPELDS
SEQ ID NO: 69-(CoV2_RBD_K417Y_K391Y) mutant Spike (S) protein amino acid
sequence:
AYTNSFTRGVYYPDKVFRSSVLHSTQDLFLPFFSNVTWFHAIHVSGTNGTKRFDNPVLPF
NDGVYFASTEKSNIIRGWIFGTTLDSKTQSLLIVNNATNVVIKVCEFQFCNDPFLGVYYH
KNNKSWMESEFRVYSSANNCTFEYVSQPFLMDLEGKQGNFKNLREFVFKNIDGYFKIYSK
HTPINLVRDLPQGFSALEPLVDLPIGINITRFQTLLALHRSYLTPGDSSSGWTAGAAAYY
VGYLQPRTFLLKYNENGTITDAVDCALDPLSETKCTLKSFTVEKGIYQTSNFRVQPTESI
VRFPNITNLCPFGEVFNATRFASVYAWNRKRISNCVADYSVLYNSASFSTFKCYGVSPTK
LNDLCFTNVYADSFVIRGDEVRQIAPGQTGYIADYNYKLPDDFTGCVIAWNSNNLDSKVG
GNYNYLYRLFRKSNLKPFERDISTEIYQAGSTPCNGVEGFNCYFPLQSYGFQPTNGVGYQ
PYRVVVLSFELLHAPATVCGPKKSTNLVKNKCVNFNFNGLTGTGVLTESNKKFLPFQQFG
RDIADTTDAVRDPQTLEILDITPCSFGGVSVITPGTNTSNQVAVLYQGVNCTEVPVAIHA
DQLTPTWRVYSTGSNVFQTRAGCLIGAEHVNNSYECDIPIGAGICASYQTQTNSPGSASS
VASQSIIAYTMSLGAENSVAYSNNSIAIPTNFTISVTTEILPVSMTKTSVDCTMYICGDS
TECSNLLLQYGSFCTQLNRALTGIAVEQDKNTQEVFAQVKQIYKTPPIKDFGGFNFSQIL
PDPSKPSKRSFIEDLLFNKVTLADAGFIKQYGDCLGDIAARDLICAQKFNGLTVLPPLLT
DEMIAQYTSALLAGTITSGWTFGAGAALQIPFAMQMAYRFNGIGVTQNVLYENQKLIANQ
FNSAIGKIQDSLSSTASALGKLQDVVNQNAQALNTLVKQLSSNFGAISSVLNDILSRLDP
PEAEVQIDRLITGRLQSLQTYVTQQLIRAAEIRASANLAATKMSECVLGQSKRVDFCGKG
YHLMSFPQSAPHGVVFLHVTYVPAQEKNFTTAPAICHDGKAHFPREGVFVSNGTHWFVTQ
RNFYEPQIITTDNTFVSGNCDVVIGIVNNTVYDPLQPELDS
SEQ ID NO: 70-(CoV2_RBD_Y449A_Y423A) mutant Spike (S) protein amino acid
sequence:
AYTNSFTRGVYYPDKVFRSSVLHSTQDLFLPFFSNVTWFHAIHVSGTNGTKRFDNPVLPF
NDGVYFASTEKSNIIRGWIFGTTLDSKTQSLLIVNNATNVVIKVCEFQFCNDPFLGVYYH
KNNKSWMESEFRVYSSANNCTFEYVSQPFLMDLEGKQGNFKNLREFVFKNIDGYFKIYSK
HTPINLVRDLPQGFSALEPLVDLPIGINITRFQTLLALHRSYLTPGDSSSGWTAGAAAYY
VGYLQPRTFLLKYNENGTITDAVDCALDPLSETKCTLKSFTVEKGIYQTSNFRVQPTESI
VRFPNITNLCPFGEVFNATRFASVYAWNRKRISNCVADYSVLYNSASFSTFKCYGVSPTK
LNDLCFTNVYADSFVIRGDEVRQIAPGQTGKIADYNYKLPDDFTGCVIAWNSNNLDSKVG
GNANYLYRLFRKSNLKPFERDISTEIYQAGSTPCNGVEGFNCYFPLQSYGFQPTNGVGYQ
PYRVVVLSFELLHAPATVCGPKKSTNLVKNKCVNFNFNGLTGTGVLTESNKKFLPFQQFG
RDIADTTDAVRDPQTLEILDITPCSFGGVSVITPGTNTSNQVAVLYQGVNCTEVPVAIHA
DQLTPTWRVYSTGSNVFQTRAGCLIGAEHVNNSYECDIPIGAGICASYQTQTNSPGSASS
VASQSIIAYTMSLGAENSVAYSNNSIAIPTNFTISVTTEILPVSMTKTSVDCTMYICGDS
TECSNLLLQYGSFCTQLNRALTGIAVEQDKNTQEVFAQVKQIYKTPPIKDFGGFNFSQIL
PDPSKPSKRSFIEDLLFNKVTLADAGFIKQYGDCLGDIAARDLICAQKFNGLTVLPPLLT
DEMIAQYTSALLAGTITSGWTFGAGAALQIPFAMQMAYRFNGIGVTQNVLYENQKLIANQ
FNSAIGKIQDSLSSTASALGKLQDVVNQNAQALNTLVKQLSSNFGAISSVLNDILSRLDP
PEAEVQIDRLITGRLQSLQTYVTQQLIRAAEIRASANLAATKMSECVLGQSKRVDFCGKG
YHLMSFPQSAPHGVVFLHVTYVPAQEKNFTTAPAICHDGKAHFPREGVFVSNGTHWFVTQ
RNFYEPQIITTDNTFVSGNCDVVIGIVNNTVYDPLQPELDS
SEQ ID NO: 71-(Cov2_RBD_Y453A_Y427A) mutant Spike (S) protein amino acid
sequence:
AYTNSFTRGVYYPDKVFRSSVLHSTQDLFLPFFSNVTWFHAIHVSGTNGTKRFDNPVLPF
NDGVYFASTEKSNIIRGWIFGTTLDSKTQSLLIVNNATNVVIKVCEFQFCNDPFLGVYYH
KNNKSWMESEFRVYSSANNCTFEYVSQPFLMDLEGKQGNFKNLREFVFKNIDGYFKIYSK
HTPINLVRDLPQGFSALEPLVDLPIGINITRFQTLLALHRSYLTPGDSSSGWTAGAAAYY
VGYLQPRTFLLKYNENGTITDAVDCALDPLSETKCTLKSFTVEKGIYQTSNFRVQPTESI
VRFPNITNLCPFGEVFNATRFASVYAWNRKRISNCVADYSVLYNSASFSTFKCYGVSPTK
LNDLCFTNVYADSFVIRGDEVRQIAPGQTGKIADYNYKLPDDFTGCVIAWNSNNLDSKVG
GNYNYLARLFRKSNLKPFERDISTEIYQAGSTPCNGVEGFNCYFPLQSYGFQPTNGVGYQ
PYRVVVLSFELLHAPATVCGPKKSTNLVKNKCVNFNFNGLTGTGVLTESNKKFLPFQQFG
RDIADTTDAVRDPQTLEILDITPCSFGGVSVITPGTNTSNQVAVLYQGVNCTEVPVAIHA
DQLTPTWRVYSTGSNVFQTRAGCLIGAEHVNNSYECDIPIGAGICASYQTQTNSPGSASS
VASQSIIAYTMSLGAENSVAYSNNSIAIPTNFTISVTTEILPVSMTKTSVDCTMYICGDS
TECSNLLLQYGSFCTQLNRALTGIAVEQDKNTQEVFAQVKQIYKTPPIKDFGGFNFSQIL
PDPSKPSKRSFIEDLLFNKVTLADAGFIKQYGDCLGDIAARDLICAQKFNGLTVLPPLLT
DEMIAQYTSALLAGTITSGWTFGAGAALQIPFAMQMAYRFNGIGVTQNVLYENQKLIANQ
FNSAIGKIQDSLSSTASALGKLQDVVNQNAQALNTLVKQLSSNFGAISSVLNDILSRLDP
PEAEVQIDRLITGRLQSLQTYVTQQLIRAAEIRASANLAATKMSECVLGQSKRVDFCGKG
YHLMSFPQSAPHGVVFLHVTYVPAQEKNFTTAPAICHDGKAHFPREGVFVSNGTHWFVTQ
RNFYEPQIITTDNTFVSGNCDVVIGIVNNTVYDPLQPELDS
SEQ ID NO: 72-(CoV2_RBD_L455A_L429A) mutant Spike (S) protein amino acid
sequence:
AYTNSFTRGVYYPDKVFRSSVLHSTQDLFLPFFSNVTWFHAIHVSGTNGTKRFDNPVLPF
NDGVYFASTEKSNIIRGWIFGTTLDSKTQSLLIVNNATNVVIKVCEFQFCNDPFLGVYYH
KNNKSWMESEFRVYSSANNCTFEYVSQPFLMDLEGKQGNFKNLREFVFKNIDGYFKIYSK
HTPINLVRDLPQGFSALEPLVDLPIGINITRFQTLLALHRSYLTPGDSSSGWTAGAAAYY
VGYLQPRTFLLKYNENGTITDAVDCALDPLSETKCTLKSFTVEKGIYQTSNFRVQPTESI
VRFPNITNLCPFGEVFNATRFASVYAWNRKRISNCVADYSVLYNSASFSTFKCYGVSPTK
LNDLCFTNVYADSFVIRGDEVRQIAPGQTGKIADYNYKLPDDFTGCVIAWNSNNLDSKVG
GNYNYLYRAFRKSNLKPFERDISTEIYQAGSTPCNGVEGFNCYFPLQSYGFQPTNGVGYQ
PYRVVVLSFELLHAPATVCGPKKSTNLVKNKCVNFNFNGLTGTGVLTESNKKFLPFQQFG
RDIADTTDAVRDPQTLEILDITPCSFGGVSVITPGTNTSNQVAVLYQGVNCTEVPVAIHA
DQLTPTWRVYSTGSNVFQTRAGCLIGAEHVNNSYECDIPIGAGICASYQTQTNSPGSASS
VASQSIIAYTMSLGAENSVAYSNNSIAIPTNFTISVTTEILPVSMTKTSVDCTMYICGDS
TECSNLLLQYGSFCTQLNRALTGIAVEQDKNTQEVFAQVKQIYKTPPIKDFGGFNFSQIL
PDPSKPSKRSFIEDLLFNKVTLADAGFIKQYGDCLGDIAARDLICAQKFNGLTVLPPLLT
DEMIAQYTSALLAGTITSGWTFGAGAALQIPFAMQMAYRFNGIGVTQNVLYENQKLIANQ
FNSAIGKIQDSLSSTASALGKLQDVVNQNAQALNTLVKQLSSNFGAISSVLNDILSRLDP
PEAEVQIDRLITGRLQSLQTYVTQQLIRAAEIRASANLAATKMSECVLGQSKRVDFCGKG
YHLMSFPQSAPHGVVFLHVTYVPAQEKNFTTAPAICHDGKAHFPREGVFVSNGTHWFVTQ
RNFYEPQIITTDNTFVSGNCDVVIGIVNNTVYDPLQPELDS
SEQ ID NO: 73- (CoV2_RBD_L455H_L429H) mutant Spike (S) protein amino acid
sequence:
AYTNSFTRGVYYPDKVFRSSVLHSTQDLFLPFFSNVTWFHAIHVSGTNGTKRFDNPVLPF
NDGVYFASTEKSNIIRGWIFGTTLDSKTQSLLIVNNATNVVIKVCEFQFCNDPFLGVYYH
KNNKSWMESEFRVYSSANNCTFEYVSQPFLMDLEGKQGNFKNLREFVFKNIDGYFKIYSK
HTPINLVRDLPQGFSALEPLVDLPIGINITRFQTLLALHRSYLTPGDSSSGWTAGAAAYY
VGYLQPRTFLLKYNENGTITDAVDCALDPLSETKCTLKSFTVEKGIYQTSNFRVQPTESI
VRFPNITNLCPFGEVFNATRFASVYAWNRKRISNCVADYSVLYNSASFSTFKCYGVSPTK
LNDLCFTNVYADSFVIRGDEVRQIAPGQTGKIADYNYKLPDDFTGCVIAWNSNNLDSKVG
GNYNYLYRHFRKSNLKPFERDISTEIYQAGSTPCNGVEGFNCYFPLQSYGFQPTNGVGYQ
PYRVVVLSFELLHAPATVCGPKKSTNLVKNKCVNFNFNGLTGTGVLTESNKKFLPFQQFG
RDIADTTDAVRDPQTLEILDITPCSFGGVSVITPGTNTSNQVAVLYQGVNCTEVPVAIHA
DQLTPTWRVYSTGSNVFQTRAGCLIGAEHVNNSYECDIPIGAGICASYQTQTNSPGSASS
VASQSIIAYTMSLGAENSVAYSNNSIAIPTNFTISVTTEILPVSMTKTSVDCTMYICGDS
TECSNLLLQYGSFCTQLNRALTGIAVEQDKNTQEVFAQVKQIYKTPPIKDFGGFNFSQIL
PDPSKPSKRSFIEDLLFNKVTLADAGFIKQYGDCLGDIAARDLICAQKFNGLTVLPPLLT
DEMIAQYTSALLAGTITSGWTFGAGAALQIPFAMQMAYRFNGIGVTQNVLYENQKLIANQ
FNSAIGKIQDSLSSTASALGKLQDVVNQNAQALNTLVKQLSSNFGAISSVLNDILSRLDP
PEAEVQIDRLITGRLQSLQTYVTQQLIRAAEIRASANLAATKMSECVLGQSKRVDFCGKG
YHLMSFPQSAPHGVVFLHVTYVPAQEKNFTTAPAICHDGKAHFPREGVFVSNGTHWFVTQ
RNFYEPQIITTDNTFVSGNCDVVIGIVNNTVYDPLQPELDS
SEQ ID NO: 74-(CoV2_RBD_L455M_L429M) mutant Spike (S) protein amino acid
sequence:
AYTNSFTRGVYYPDKVFRSSVLHSTQDLFLPFFSNVTWFHAIHVSGTNGTKRFDNPVLPF
NDGVYFASTEKSNIIRGWIFGTTLDSKTQSLLIVNNATNVVIKVCEFQFCNDPFLGVYYH
KNNKSWMESEFRVYSSANNCTFEYVSQPFLMDLEGKQGNFKNLREFVFKNIDGYFKIYSK
HTPINLVRDLPQGFSALEPLVDLPIGINITRFQTLLALHRSYLTPGDSSSGWTAGAAAYY
VGYLQPRTFLLKYNENGTITDAVDCALDPLSETKCTLKSFTVEKGIYQTSNFRVQPTESI
VRFPNITNLCPFGEVFNATRFASVYAWNRKRISNCVADYSVLYNSASFSTFKCYGVSPTK
LNDLCFTNVYADSFVIRGDEVRQIAPGQTGKIADYNYKLPDDFTGCVIAWNSNNLDSKVG
GNYNYLYRMFRKSNLKPFERDISTEIYQAGSTPCNGVEGFNCYFPLQSYGFQPTNGVGYQ
PYRVVVLSFELLHAPATVCGPKKSTNLVKNKCVNFNFNGLTGTGVLTESNKKFLPFQQFG
RDIADTTDAVRDPQTLEILDITPCSFGGVSVITPGTNTSNQVAVLYQGVNCTEVPVAIHA
DQLTPTWRVYSTGSNVFQTRAGCLIGAEHVNNSYECDIPIGAGICASYQTQTNSPGSASS
VASQSIIAYTMSLGAENSVAYSNNSIAIPTNFTISVTTEILPVSMTKTSVDCTMYICGDS
TECSNLLLQYGSFCTQLNRALTGIAVEQDKNTQEVFAQVKQIYKTPPIKDFGGFNFSQIL
PDPSKPSKRSFIEDLLFNKVTLADAGFIKQYGDCLGDIAARDLICAQKFNGLTVLPPLLT
DEMIAQYTSALLAGTITSGWTFGAGAALQIPFAMQMAYRFNGIGVTQNVLYENQKLIANQ
FNSAIGKIQDSLSSTASALGKLQDVVNQNAQALNTLVKQLSSNFGAISSVLNDILSRLDP
PEAEVQIDRLITGRLQSLQTYVTQQLIRAAEIRASANLAATKMSECVLGQSKRVDFCGKG
YHLMSFPQSAPHGVVFLHVTYVPAQEKNFTTAPAICHDGKAHFPREGVFVSNGTHWFVTQ
RNFYEPQIITTDNTFVSGNCDVVIGIVNNTVYDPLQPELDS
SEQ ID NO: 75-(CoV2_RBD_L455N_L429N) mutant Spike (S) protein amino acid
sequence:
AYTNSFTRGVYYPDKVFRSSVLHSTQDLFLPFFSNVTWFHAIHVSGTNGTKRFDNPVLPF
NDGVYFASTEKSNIIRGWIFGTTLDSKTQSLLIVNNATNVVIKVCEFQFCNDPFLGVYYH
KNNKSWMESEFRVYSSANNCTFEYVSQPFLMDLEGKQGNFKNLREFVFKNIDGYFKIYSK
HTPINLVRDLPQGFSALEPLVDLPIGINITRFQTLLALHRSYLTPGDSSSGWTAGAAAYY
VGYLQPRTFLLKYNENGTITDAVDCALDPLSETKCTLKSFTVEKGIYQTSNFRVQPTESI
VRFPNITNLCPFGEVFNATRFASVYAWNRKRISNCVADYSVLYNSASFSTFKCYGVSPTK
LNDLCFTNVYADSFVIRGDEVRQIAPGQTGKIADYNYKLPDDFTGCVIAWNSNNLDSKVG
GNYNYLYRNFRKSNLKPFERDISTEIYQAGSTPCNGVEGFNCYFPLQSYGFQPTNGVGYQ
PYRVVVLSFELLHAPATVCGPKKSTNLVKNKCVNFNFNGLTGTGVLTESNKKFLPFQQFG
RDIADTTDAVRDPQTLEILDITPCSFGGVSVITPGTNTSNQVAVLYQGVNCTEVPVAIHA
DQLTPTWRVYSTGSNVFQTRAGCLIGAEHVNNSYECDIPIGAGICASYQTQTNSPGSASS
VASQSIIAYTMSLGAENSVAYSNNSIAIPTNFTISVTTEILPVSMTKTSVDCTMYICGDS
TECSNLLLQYGSFCTQLNRALTGIAVEQDKNTQEVFAQVKQIYKTPPIKDFGGFNFSQIL
PDPSKPSKRSFIEDLLFNKVTLADAGFIKQYGDCLGDIAARDLICAQKFNGLTVLPPLLT
DEMIAQYTSALLAGTITSGWTFGAGAALQIPFAMQMAYRFNGIGVTQNVLYENQKLIANQ
FNSAIGKIQDSLSSTASALGKLQDVVNQNAQALNTLVKQLSSNFGAISSVLNDILSRLDP
PEAEVQIDRLITGRLQSLQTYVTQQLIRAAEIRASANLAATKMSECVLGQSKRVDFCGKG
YHLMSFPQSAPHGVVFLHVTYVPAQEKNFTTAPAICHDGKAHFPREGVFVSNGTHWFVTQ
RNFYEPQIITTDNTFVSGNCDVVIGIVNNTVYDPLQPELDS
SEQ ID NO: 76-(CoV2_RBD_L455W_L429W) mutant Spike (S) protein amino acid
sequence:
AYTNSFTRGVYYPDKVFRSSVLHSTQDLFLPFFSNVTWFHAIHVSGTNGTKRFDNPVLPF
NDGVYFASTEKSNIIRGWIFGTTLDSKTQSLLIVNNATNVVIKVCEFQFCNDPFLGVYYH
KNNKSWMESEFRVYSSANNCTFEYVSQPFLMDLEGKQGNFKNLREFVFKNIDGYFKIYSK
HTPINLVRDLPQGFSALEPLVDLPIGINITRFQTLLALHRSYLTPGDSSSGWTAGAAAYY
VGYLQPRTFLLKYNENGTITDAVDCALDPLSETKCTLKSFTVEKGIYQTSNFRVQPTESI
VRFPNITNLCPFGEVFNATRFASVYAWNRKRISNCVADYSVLYNSASFSTFKCYGVSPTK
LNDLCFTNVYADSFVIRGDEVRQIAPGQTGKIADYNYKLPDDFTGCVIAWNSNNLDSKVG
GNYNYLYRWFRKSNLKPFERDISTEIYQAGSTPCNGVEGFNCYFPLQSYGFQPTNGVGYQ
PYRVVVLSFELLHAPATVCGPKKSTNLVKNKCVNFNFNGLTGTGVLTESNKKFLPFQQFG
RDIADTTDAVRDPQTLEILDITPCSFGGVSVITPGTNTSNQVAVLYQGVNCTEVPVAIHA
DQLTPTWRVYSTGSNVFQTRAGCLIGAEHVNNSYECDIPIGAGICASYQTQTNSPGSASS
VASQSIIAYTMSLGAENSVAYSNNSIAIPTNFTISVTTEILPVSMTKTSVDCTMYICGDS
TECSNLLLQYGSFCTQLNRALTGIAVEQDKNTQEVFAQVKQIYKTPPIKDFGGFNFSQIL
PDPSKPSKRSFIEDLLFNKVTLADAGFIKQYGDCLGDIAARDLICAQKFNGLTVLPPLLT
DEMIAQYTSALLAGTITSGWTFGAGAALQIPFAMQMAYRFNGIGVTQNVLYENQKLIANQ
FNSAIGKIQDSLSSTASALGKLQDVVNQNAQALNTLVKQLSSNFGAISSVLNDILSRLDP
PEAEVQIDRLITGRLQSLQTYVTQQLIRAAEIRASANLAATKMSECVLGQSKRVDFCGKG
YHLMSFPQSAPHGVVFLHVTYVPAQEKNFTTAPAICHDGKAHFPREGVFVSNGTHWFVTQ
RNFYEPQIITTDNTFVSGNCDVVIGIVNNTVYDPLQPELDS
SEQ ID NO: 77-(CoV2_RBD_F456H_F430H) mutant Spike (S) protein amino acid
sequence:
AYTNSFTRGVYYPDKVFRSSVLHSTQDLFLPFFSNVTWFHAIHVSGTNGTKRFDNPVLPF
NDGVYFASTEKSNIIRGWIFGTTLDSKTQSLLIVNNATNVVIKVCEFQFCNDPFLGVYYH
KNNKSWMESEFRVYSSANNCTFEYVSQPFLMDLEGKQGNFKNLREFVFKNIDGYFKIYSK
HTPINLVRDLPQGFSALEPLVDLPIGINITRFQTLLALHRSYLTPGDSSSGWTAGAAAYY
VGYLQPRTFLLKYNENGTITDAVDCALDPLSETKCTLKSFTVEKGIYQTSNFRVQPTESI
VRFPNITNLCPFGEVFNATRFASVYAWNRKRISNCVADYSVLYNSASFSTFKCYGVSPTK
LNDLCFTNVYADSFVIRGDEVRQIAPGQTGKIADYNYKLPDDFTGCVIAWNSNNLDSKVG
GNYNYLYRLHRKSNLKPFERDISTEIYQAGSTPCNGVEGFNCYFPLQSYGFQPTNGVGYQ
PYRVVVLSFELLHAPATVCGPKKSTNLVKNKCVNFNFNGLTGTGVLTESNKKFLPFQQFG
RDIADTTDAVRDPQTLEILDITPCSFGGVSVITPGTNTSNQVAVLYQGVNCTEVPVAIHA
DQLTPTWRVYSTGSNVFQTRAGCLIGAEHVNNSYECDIPIGAGICASYQTQTNSPGSASS
VASQSIIAYTMSLGAENSVAYSNNSIAIPTNFTISVTTEILPVSMTKTSVDCTMYICGDS
TECSNLLLQYGSFCTQLNRALTGIAVEQDKNTQEVFAQVKQIYKTPPIKDFGGFNFSQIL
PDPSKPSKRSFIEDLLFNKVTLADAGFIKQYGDCLGDIAARDLICAQKFNGLTVLPPLLT
DEMIAQYTSALLAGTITSGWTFGAGAALQIPFAMQMAYRFNGIGVTQNVLYENQKLIANQ
FNSAIGKIQDSLSSTASALGKLQDVVNQNAQALNTLVKQLSSNFGAISSVLNDILSRLDP
PEAEVQIDRLITGRLQSLQTYVTQQLIRAAEIRASANLAATKMSECVLGQSKRVDFCGKG
YHLMSFPQSAPHGVVFLHVTYVPAQEKNFTTAPAICHDGKAHFPREGVFVSNGTHWFVTQ
RNFYEPQIITTDNTFVSGNCDVVIGIVNNTVYDPLQPELDS
SEQ ID NO: 78-(CoV2_RBD_F4561_F4301 ) mutant Spike (S) protein amino acid
sequence:
AYTNSFTRGVYYPDKVFRSSVLHSTQDLFLPFFSNVTWFHAIHVSGTNGTKRFDNPVLPF
NDGVYFASTEKSNIIRGWIFGTTLDSKTQSLLIVNNATNVVIKVCEFQFCNDPFLGVYYH
KNNKSWMESEFRVYSSANNCTFEYVSQPFLMDLEGKQGNFKNLREFVFKNIDGYFKIYSK
HTPINLVRDLPQGFSALEPLVDLPIGINITRFQTLLALHRSYLTPGDSSSGWTAGAAAYY
VGYLQPRTFLLKYNENGTITDAVDCALDPLSETKCTLKSFTVEKGIYQTSNFRVQPTESI
VRFPNITNLCPFGEVFNATRFASVYAWNRKRISNCVADYSVLYNSASFSTFKCYGVSPTK
LNDLCFTNVYADSFVIRGDEVRQIAPGQTGKIADYNYKLPDDFTGCVIAWNSNNLDSKVG
GNYNYLYRLIRKSNLKPFERDISTEIYQAGSTPCNGVEGFNCYFPLQSYGFQPTNGVGYQ
PYRVVVLSFELLHAPATVCGPKKSTNLVKNKCVNFNFNGLTGTGVLTESNKKFLPFQQFG
RDIADTTDAVRDPQTLEILDITPCSFGGVSVITPGTNTSNQVAVLYQGVNCTEVPVAIHA
DQLTPTWRVYSTGSNVFQTRAGCLIGAEHVNNSYECDIPIGAGICASYQTQTNSPGSASS
VASQSIIAYTMSLGAENSVAYSNNSIAIPTNFTISVTTEILPVSMTKTSVDCTMYICGDS
TECSNLLLQYGSFCTQLNRALTGIAVEQDKNTQEVFAQVKQIYKTPPIKDFGGFNFSQIL
PDPSKPSKRSFIEDLLFNKVTLADAGFIKQYGDCLGDIAARDLICAQKFNGLTVLPPLLT
DEMIAQYTSALLAGTITSGWTFGAGAALQIPFAMQMAYRFNGIGVTQNVLYENQKLIANQ
FNSAIGKIQDSLSSTASALGKLQDVVNQNAQALNTLVKQLSSNFGAISSVLNDILSRLDP
PEAEVQIDRLITGRLQSLQTYVTQQLIRAAEIRASANLAATKMSECVLGQSKRVDFCGKG
YHLMSFPQSAPHGVVFLHVTYVPAQEKNFTTAPAICHDGKAHFPREGVFVSNGTHWFVTQ
RNFYEPQIITTDNTFVSGNCDVVIGIVNNTVYDPLQPELDS
SEQ ID NO: 79-(Cov2_RBD_F456W_F430W) mutant Spike (S) protein amino acid
sequence:
AYTNSFTRGVYYPDKVFRSSVLHSTQDLFLPFFSNVTWFHAIHVSGTNGTKRFDNPVLPF
NDGVYFASTEKSNIIRGWIFGTTLDSKTQSLLIVNNATNVVIKVCEFQFCNDPFLGVYYH
KNNKSWMESEFRVYSSANNCTFEYVSQPFLMDLEGKQGNFKNLREFVFKNIDGYFKIYSK
HTPINLVRDLPQGFSALEPLVDLPIGINITRFQTLLALHRSYLTPGDSSSGWTAGAAAYY
VGYLQPRTFLLKYNENGTITDAVDCALDPLSETKCTLKSFTVEKGIYQTSNFRVQPTESI
VRFPNITNLCPFGEVFNATRFASVYAWNRKRISNCVADYSVLYNSASFSTFKCYGVSPTK
LNDLCFTNVYADSFVIRGDEVRQIAPGQTGKIADYNYKLPDDFTGCVIAWNSNNLDSKVG
GNYNYLYRLWRKSNLKPFERDISTEIYQAGSTPCNGVEGFNCYFPLQSYGFQPTNGVGYQ
PYRVVVLSFELLHAPATVCGPKKSTNLVKNKCVNFNFNGLTGTGVLTESNKKFLPFQQFG
RDIADTTDAVRDPQTLEILDITPCSFGGVSVITPGTNTSNQVAVLYQGVNCTEVPVAIHA
DQLTPTWRVYSTGSNVFQTRAGCLIGAEHVNNSYECDIPIGAGICASYQTQTNSPGSASS
VASQSIIAYTMSLGAENSVAYSNNSIAIPTNFTISVTTEILPVSMTKTSVDCTMYICGDS
TECSNLLLQYGSFCTQLNRALTGIAVEQDKNTQEVFAQVKQIYKTPPIKDFGGFNFSQIL
PDPSKPSKRSFIEDLLFNKVTLADAGFIKQYGDCLGDIAARDLICAQKFNGLTVLPPLLT
DEMIAQYTSALLAGTITSGWTFGAGAALQIPFAMQMAYRFNGIGVTQNVLYENQKLIANQ
FNSAIGKIQDSLSSTASALGKLQDVVNQNAQALNTLVKQLSSNFGAISSVLNDILSRLDP
PEAEVQIDRLITGRLQSLQTYVTQQLIRAAEIRASANLAATKMSECVLGQSKRVDFCGKG
YHLMSFPQSAPHGVVFLHVTYVPAQEKNFTTAPAICHDGKAHFPREGVFVSNGTHWFVTQ
RNFYEPQIITTDNTFVSGNCDVVIGIVNNTVYDPLQPELDS
SEQ ID NO: 80-(CoV2_RBD_F456Y_F430Y) mutant Spike (S) protein amino acid
sequence:
AYTNSFTRGVYYPDKVFRSSVLHSTQDLFLPFFSNVTWFHAIHVSGTNGTKRFDNPVLPF
NDGVYFASTEKSNIIRGWIFGTTLDSKTQSLLIVNNATNVVIKVCEFQFCNDPFLGVYYH
KNNKSWMESEFRVYSSANNCTFEYVSQPFLMDLEGKQGNFKNLREFVFKNIDGYFKIYSK
HTPINLVRDLPQGFSALEPLVDLPIGINITRFQTLLALHRSYLTPGDSSSGWTAGAAAYY
VGYLQPRTFLLKYNENGTITDAVDCALDPLSETKCTLKSFTVEKGIYQTSNFRVQPTESI
VRFPNITNLCPFGEVFNATRFASVYAWNRKRISNCVADYSVLYNSASFSTFKCYGVSPTK
LNDLCFTNVYADSFVIRGDEVRQIAPGQTGKIADYNYKLPDDFTGCVIAWNSNNLDSKVG
GNYNYLYRLYRKSNLKPFERDISTEIYQAGSTPCNGVEGFNCYFPLQSYGFQPTNGVGYQ
PYRVVVLSFELLHAPATVCGPKKSTNLVKNKCVNFNFNGLTGTGVLTESNKKFLPFQQFG
RDIADTTDAVRDPQTLEILDITPCSFGGVSVITPGTNTSNQVAVLYQGVNCTEVPVAIHA
DQLTPTWRVYSTGSNVFQTRAGCLIGAEHVNNSYECDIPIGAGICASYQTQTNSPGSASS
VASQSIIAYTMSLGAENSVAYSNNSIAIPTNFTISVTTEILPVSMTKTSVDCTMYICGDS
TECSNLLLQYGSFCTQLNRALTGIAVEQDKNTQEVFAQVKQIYKTPPIKDFGGFNFSQIL
PDPSKPSKRSFIEDLLFNKVTLADAGFIKQYGDCLGDIAARDLICAQKFNGLTVLPPLLT
DEMIAQYTSALLAGTITSGWTFGAGAALQIPFAMQMAYRFNGIGVTQNVLYENQKLIANQ
FNSAIGKIQDSLSSTASALGKLQDVVNQNAQALNTLVKQLSSNFGAISSVLNDILSRLDP
PEAEVQIDRLITGRLQSLQTYVTQQLIRAAEIRASANLAATKMSECVLGQSKRVDFCGKG
YHLMSFPQSAPHGVVFLHVTYVPAQEKNFTTAPAICHDGKAHFPREGVFVSNGTHWFVTQ
RNFYEPQIITTDNTFVSGNCDVVIGIVNNTVYDPLQPELDS
SEQ ID NO: 81-(CoV2_RBD_Y473W_Y447W) mutant Spike (S) protein amino acid
sequence:
AYTNSFTRGVYYPDKVFRSSVLHSTQDLFLPFFSNVTWFHAIHVSGTNGTKRFDNPVLPF
NDGVYFASTEKSNIIRGWIFGTTLDSKTQSLLIVNNATNVVIKVCEFQFCNDPFLGVYYH
KNNKSWMESEFRVYSSANNCTFEYVSQPFLMDLEGKQGNFKNLREFVFKNIDGYFKIYSK
HTPINLVRDLPQGFSALEPLVDLPIGINITRFQTLLALHRSYLTPGDSSSGWTAGAAAYY
VGYLQPRTFLLKYNENGTITDAVDCALDPLSETKCTLKSFTVEKGIYQTSNFRVQPTESI
VRFPNITNLCPFGEVFNATRFASVYAWNRKRISNCVADYSVLYNSASFSTFKCYGVSPTK
LNDLCFTNVYADSFVIRGDEVRQIAPGQTGKIADYNYKLPDDFTGCVIAWNSNNLDSKVG
GNYNYLYRLFRKSNLKPFERDISTEIWQAGSTPCNGVEGFNCYFPLQSYGFQPTNGVGYQ
PYRVVVLSFELLHAPATVCGPKKSTNLVKNKCVNFNFNGLTGTGVLTESNKKFLPFQQFG
RDIADTTDAVRDPQTLEILDITPCSFGGVSVITPGTNTSNQVAVLYQGVNCTEVPVAIHA
DQLTPTWRVYSTGSNVFQTRAGCLIGAEHVNNSYECDIPIGAGICASYQTQTNSPGSASS
VASQSIIAYTMSLGAENSVAYSNNSIAIPTNETISVTTEILPVSMTKTSVDCTMYICGDS
TECSNLLLQYGSFCTQLNRALTGIAVEQDKNTQEVFAQVKQIYKTPPIKDFGGFNFSQIL
PDPSKPSKRSFIEDLLFNKVTLADAGFIKQYGDCLGDIAARDLICAQKFNGLTVLPPLLT
DEMIAQYTSALLAGTITSGWTFGAGAALQIPFAMQMAYRFNGIGVTQNVLYENQKLIANQ
FNSAIGKIQDSLSSTASALGKLQDVVNQNAQALNTLVKQLSSNFGAISSVLNDILSRLDP
PEAEVQIDRLITGRLQSLQTYVTQQLIRAAEIRASANLAATKMSECVLGQSKRVDFCGKG
YHLMSFPQSAPHGVVFLHVTYVPAQEKNFTTAPAICHDGKAHFPREGVFVSNGTHWFVTQ
RNFYEPQIITTDNTFVSGNCDVVIGIVNNTVYDPLQPELDS
SEQ ID NO: 82-(CoV2_RBD_A475M_A449M) mutant Spike (S) protein amino acid
sequence:
AYTNSFTRGVYYPDKVFRSSVLHSTQDLFLPFFSNVTWFHAIHVSGTNGTKRFDNPVLPF
NDGVYFASTEKSNIIRGWIFGTTLDSKTQSLLIVNNATNVVIKVCEFQFCNDPFLGVYYH
KNNKSWMESEFRVYSSANNCTFEYVSQPFLMDLEGKQGNFKNLREFVFKNIDGYFKIYSK
HTPINLVRDLPQGFSALEPLVDLPIGINITRFQTLLALHRSYLTPGDSSSGWTAGAAAYY
VGYLQPRTFLLKYNENGTITDAVDCALDPLSETKCTLKSFTVEKGIYQTSNFRVQPTESI
VRFPNITNLCPFGEVFNATRFASVYAWNRKRISNCVADYSVLYNSASFSTFKCYGVSPTK
LNDLCFTNVYADSFVIRGDEVRQIAPGQTGKIADYNYKLPDDFTGCVIAWNSNNLDSKVG
GNYNYLYRLFRKSNLKPFERDISTEIYQMGSTPCNGVEGFNCYFPLQSYGFQPTNGVGYQ
PYRVVVLSFELLHAPATVCGPKKSTNLVKNKCVNFNFNGLTGTGVLTESNKKFLPFQQFG
RDIADTTDAVRDPQTLEILDITPCSFGGVSVITPGTNTSNQVAVLYQGVNCTEVPVAIHA
DQLTPTWRVYSTGSNVFQTRAGCLIGAEHVNNSYECDIPIGAGICASYQTQTNSPGSASS
VASQSIIAYTMSLGAENSVAYSNNSIAIPTNFTISVTTEILPVSMTKTSVDCTMYICGDS
TECSNLLLQYGSFCTQLNRALTGIAVEQDKNTQEVFAQVKQIYKTPPIKDFGGFNFSQIL
PDPSKPSKRSFIEDLLFNKVTLADAGFIKQYGDCLGDIAARDLICAQKFNGLTVLPPLLT
DEMIAQYTSALLAGTITSGWTFGAGAALQIPFAMQMAYRFNGIGVTQNVLYENQKLIANQ
FNSAIGKIQDSLSSTASALGKLQDVVNQNAQALNTLVKQLSSNFGAISSVLNDILSRLDP
PEAEVQIDRLITGRLQSLQTYVTQQLIRAAEIRASANLAATKMSECVLGQSKRVDFCGKG
YHLMSFPQSAPHGVVFLHVTYVPAQEKNFTTAPAICHDGKAHFPREGVFVSNGTHWFVTQ
RNFYEPQIITTDNTFVSGNCDVVIGIVNNTVYDPLQPELDS
SEQ ID NO: 83-(CoV2_RBD_G476T_G450T) mutant Spike (S) protein amino acid
sequence:
AYTNSFTRGVYYPDKVFRSSVLHSTQDLFLPFFSNVTWFHAIHVSGTNGTKRFDNPVLPF
NDGVYFASTEKSNIIRGWIFGTTLDSKTQSLLIVNNATNVVIKVCEFQFCNDPFLGVYYH
KNNKSWMESEFRVYSSANNCTFEYVSQPFLMDLEGKQGNFKNLREFVFKNIDGYFKIYSK
HTPINLVRDLPQGFSALEPLVDLPIGINITRFQTLLALHRSYLTPGDSSSGWTAGAAAYY
VGYLQPRTFLLKYNENGTITDAVDCALDPLSETKCTLKSFTVEKGIYQTSNFRVQPTESI
VRFPNITNLCPFGEVFNATRFASVYAWNRKRISNCVADYSVLYNSASFSTFKCYGVSPTK
LNDLCFTNVYADSFVIRGDEVRQIAPGQTGKIADYNYKLPDDFTGCVIAWNSNNLDSKVG
GNYNYLYRLFRKSNLKPFERDISTEIYQATSTPCNGVEGFNCYFPLQSYGFQPTNGVGYQ
PYRVVVLSFELLHAPATVCGPKKSTNLVKNKCVNFNFNGLTGTGVLTESNKKFLPFQQFG
RDIADTTDAVRDPQTLEILDITPCSFGGVSVITPGTNTSNQVAVLYQGVNCTEVPVAIHA
DQLTPTWRVYSTGSNVFQTRAGCLIGAEHVNNSYECDIPIGAGICASYQTQTNSPGSASS
VASQSIIAYTMSLGAENSVAYSNNSIAIPTNFTISVTTEILPVSMTKTSVDCTMYICGDS
TECSNLLLQYGSFCTQLNRALTGIAVEQDKNTQEVFAQVKQIYKTPPIKDFGGFNFSQIL
PDPSKPSKRSFIEDLLFNKVTLADAGFIKQYGDCLGDIAARDLICAQKFNGLTVLPPLLT
DEMIAQYTSALLAGTITSGWTFGAGAALQIPFAMQMAYRFNGIGVTQNVLYENQKLIANQ
FNSAIGKIQDSLSSTASALGKLQDVVNQNAQALNTLVKQLSSNFGAISSVLNDILSRLDP
PEAEVQIDRLITGRLQSLQTYVTQQLIRAAEIRASANLAATKMSECVLGQSKRVDFCGKG
YHLMSFPQSAPHGVVFLHVTYVPAQEKNFTTAPAICHDGKAHFPREGVFVSNGTHWFVTQ
RNFYEPQIITTDNTFVSGNCDVVIGIVNNTVYDPLQPELDS
SEQ ID NO: 84-(CoV2_RBD_F486H_F460H) mutant Spike (S) protein amino acid
sequence:
AYTNSFTRGVYYPDKVFRSSVLHSTQDLFLPFFSNVTWFHAIHVSGTNGTKRFDNPVLPF
NDGVYFASTEKSNIIRGWIFGTTLDSKTQSLLIVNNATNVVIKVCEFQFCNDPFLGVYYH
KNNKSWMESEFRVYSSANNCTFEYVSQPFLMDLEGKQGNFKNLREFVFKNIDGYFKIYSK
HTPINLVRDLPQGFSALEPLVDLPIGINITRFQTLLALHRSYLTPGDSSSGWTAGAAAYY
VGYLQPRTFLLKYNENGTITDAVDCALDPLSETKCTLKSFTVEKGIYQTSNFRVQPTESI
VRFPNITNLCPFGEVFNATRFASVYAWNRKRISNCVADYSVLYNSASFSTFKCYGVSPTK
LNDLCFTNVYADSFVIRGDEVRQIAPGQTGKIADYNYKLPDDFTGCVIAWNSNNLDSKVG
GNYNYLYRLFRKSNLKPFERDISTEIYQAGSTPCNGVEGHNCYFPLQSYGFQPTNGVGYQ
PYRVVVLSFELLHAPATVCGPKKSTNLVKNKCVNFNFNGLTGTGVLTESNKKFLPFQQFG
RDIADTTDAVRDPQTLEILDITPCSFGGVSVITPGTNTSNQVAVLYQGVNCTEVPVAIHA
DQLTPTWRVYSTGSNVFQTRAGCLIGAEHVNNSYECDIPIGAGICASYQTQTNSPGSASS
VASQSIIAYTMSLGAENSVAYSNNSIAIPTNFTISVTTEILPVSMTKTSVDCTMYICGDS
TECSNLLLQYGSFCTQLNRALTGIAVEQDKNTQEVFAQVKQIYKTPPIKDFGGFNFSQIL
PDPSKPSKRSFIEDLLFNKVTLADAGFIKQYGDCLGDIAARDLICAQKFNGLTVLPPLLT
DEMIAQYTSALLAGTITSGWTFGAGAALQIPFAMQMAYRFNGIGVTQNVLYENQKLIANQ
FNSAIGKIQDSLSSTASALGKLQDVVNQNAQALNTLVKQLSSNFGAISSVLNDILSRLDP
PEAEVQIDRLITGRLQSLQTYVTQQLIRAAEIRASANLAATKMSECVLGQSKRVDFCGKG
YHLMSFPQSAPHGVVFLHVTYVPAQEKNFTTAPAICHDGKAHFPREGVFVSNGTHWFVTQ
RNFYEPQIITTDNTFVSGNCDVVIGIVNNTVYDPLQPELDS
SEQ ID NO: 85-(CoV2_RBD_F4861_F4601) mutant Spike (S) protein amino acid
sequence:
AYTNSFTRGVYYPDKVFRSSVLHSTQDLFLPFFSNVTWFHAIHVSGTNGTKRFDNPVLPF
NDGVYFASTEKSNIIRGWIFGTTLDSKTQSLLIVNNATNVVIKVCEFQFCNDPFLGVYYH
KNNKSWMESEFRVYSSANNCTFEYVSQPFLMDLEGKQGNFKNLREFVFKNIDGYFKIYSK
HTPINLVRDLPQGFSALEPLVDLPIGINITRFQTLLALHRSYLTPGDSSSGWTAGAAAYY
VGYLQPRTFLLKYNENGTITDAVDCALDPLSETKCTLKSFTVEKGIYQTSNFRVQPTESI
VRFPNITNLCPFGEVFNATRFASVYAWNRKRISNCVADYSVLYNSASFSTFKCYGVSPTK
LNDLCFTNVYADSFVIRGDEVRQIAPGQTGKIADYNYKLPDDFTGCVIAWNSNNLDSKVG
GNYNYLYRLFRKSNLKPFERDISTEIYQAGSTPCNGVEGINCYFPLQSYGFQPTNGVGYQ
PYRVVVLSFELLHAPATVCGPKKSTNLVKNKCVNFNFNGLTGTGVLTESNKKFLPFQQFG
RDIADTTDAVRDPQTLEILDITPCSFGGVSVITPGTNTSNQVAVLYQGVNCTEVPVAIHA
DQLTPTWRVYSTGSNVFQTRAGCLIGAEHVNNSYECDIPIGAGICASYQTQTNSPGSASS
VASQSIIAYTMSLGAENSVAYSNNSIAIPTNFTISVTTEILPVSMTKTSVDCTMYICGDS
TECSNLLLQYGSFCTQLNRALTGIAVEQDKNTQEVFAQVKQIYKTPPIKDFGGFNFSQIL
PDPSKPSKRSFIEDLLFNKVTLADAGFIKQYGDCLGDIAARDLICAQKFNGLTVLPPLLT
DEMIAQYTSALLAGTITSGWTFGAGAALQIPFAMQMAYRFNGIGVTQNVLYENQKLIANQ
FNSAIGKIQDSLSSTASALGKLQDVVNQNAQALNTLVKQLSSNFGAISSVLNDILSRLDP
PEAEVQIDRLITGRLQSLQTYVTQQLIRAAEIRASANLAATKMSECVLGQSKRVDFCGKG
YHLMSFPQSAPHGVVFLHVTYVPAQEKNFTTAPAICHDGKAHFPREGVFVSNGTHWFVTQ
RNFYEPQIITTDNTFVSGNCDVVIGIVNNTVYDPLQPELDS
SEQ ID NO: 86-(CoV2_RBD_F486L_F460L) mutant Spike (S) protein amino acid
sequence:
AYTNSFTRGVYYPDKVFRSSVLHSTQDLFLPFFSNVTWFHAIHVSGTNGTKRFDNPVLPF
NDGVYFASTEKSNIIRGWIFGTTLDSKTQSLLIVNNATNVVIKVCEFQFCNDPFLGVYYH
KNNKSWMESEFRVYSSANNCTFEYVSQPFLMDLEGKQGNFKNLREFVFKNIDGYFKIYSK
HTPINLVRDLPQGFSALEPLVDLPIGINITRFQTLLALHRSYLTPGDSSSGWTAGAAAYY
VGYLQPRTFLLKYNENGTITDAVDCALDPLSETKCTLKSFTVEKGIYQTSNFRVQPTESI
VRFPNITNLCPFGEVFNATRFASVYAWNRKRISNCVADYSVLYNSASFSTFKCYGVSPTK
LNDLCFTNVYADSFVIRGDEVRQIAPGQTGKIADYNYKLPDDFTGCVIAWNSNNLDSKVG
GNYNYLYRLFRKSNLKPFERDISTEIYQAGSTPCNGVEGLNCYFPLQSYGFQPTNGVGYQ
PYRVVVLSFELLHAPATVCGPKKSTNLVKNKCVNFNFNGLTGTGVLTESNKKFLPFQQFG
RDIADTTDAVRDPQTLEILDITPCSFGGVSVITPGTNTSNQVAVLYQGVNCTEVPVAIHA
DQLTPTWRVYSTGSNVFQTRAGCLIGAEHVNNSYECDIPIGAGICASYQTQTNSPGSASS
VASQSIIAYTMSLGAENSVAYSNNSIAIPTNFTISVTTEILPVSMTKTSVDCTMYICGDS
TECSNLLLQYGSFCTQLNRALTGIAVEQDKNTQEVFAQVKQIYKTPPIKDFGGFNFSQIL
PDPSKPSKRSFIEDLLFNKVTLADAGFIKQYGDCLGDIAARDLICAQKFNGLTVLPPLLT
DEMIAQYTSALLAGTITSGWTFGAGAALQIPFAMQMAYRFNGIGVTQNVLYENQKLIANQ
FNSAIGKIQDSLSSTASALGKLQDVVNQNAQALNTLVKQLSSNFGAISSVLNDILSRLDP
PEAEVQIDRLITGRLQSLQTYVTQQLIRAAEIRASANLAATKMSECVLGQSKRVDFCGKG
YHLMSFPQSAPHGVVFLHVTYVPAQEKNFTTAPAICHDGKAHFPREGVFVSNGTHWFVTQ
RNFYEPQIITTDNTEVSGNCDVVIGIVNNTVYDPLQPELDS
SEQ ID NO: 87-(CoV2_RBD_F486M_F460M) mutant Spike (S) protein amino acid
sequence:
AYTNSFTRGVYYPDKVFRSSVLHSTQDLFLPFFSNVTWFHAIHVSGTNGTKRFDNPVLPF
NDGVYFASTEKSNIIRGWIFGTTLDSKTQSLLIVNNATNVVIKVCEFQFCNDPFLGVYYH
KNNKSWMESEFRVYSSANNCTFEYVSQPFLMDLEGKQGNFKNLREFVFKNIDGYFKIYSK
HTPINLVRDLPQGFSALEPLVDLPIGINITRFQTLLALHRSYLTPGDSSSGWTAGAAAYY
VGYLQPRTFLLKYNENGTITDAVDCALDPLSETKCTLKSFTVEKGIYQTSNFRVQPTESI
VRFPNITNLCPFGEVFNATRFASVYAWNRKRISNCVADYSVLYNSASFSTFKCYGVSPTK
LNDLCFTNVYADSFVIRGDEVRQIAPGQTGKIADYNYKLPDDFTGCVIAWNSNNLDSKVG
GNYNYLYRLFRKSNLKPFERDISTEIYQAGSTPCNGVEGMNCYFPLQSYGFQPTNGVGYQ
PYRVVVLSFELLHAPATVCGPKKSTNLVKNKCVNFNFNGLTGTGVLTESNKKFLPFQQFG
RDIADTTDAVRDPQTLEILDITPCSFGGVSVITPGTNTSNQVAVLYQGVNCTEVPVAIHA
DQLTPTWRVYSTGSNVFQTRAGCLIGAEHVNNSYECDIPIGAGICASYQTQTNSPGSASS
VASQSIIAYTMSLGAENSVAYSNNSIAIPTNFTISVTTEILPVSMTKTSVDCTMYICGDS
TECSNLLLQYGSFCTQLNRALTGIAVEQDKNTQEVFAQVKQIYKTPPIKDFGGFNFSQIL
PDPSKPSKRSFIEDLLFNKVTLADAGFIKQYGDCLGDIAARDLICAQKFNGLTVLPPLLT
DEMIAQYTSALLAGTITSGWTFGAGAALQIPFAMQMAYRFNGIGVTQNVLYENQKLIANQ
FNSAIGKIQDSLSSTASALGKLQDVVNQNAQALNTLVKQLSSNFGAISSVLNDILSRLDP
PEAEVQIDRLITGRLQSLQTYVTQQLIRAAEIRASANLAATKMSECVLGQSKRVDFCGKG
YHLMSFPQSAPHGVVFLHVTYVPAQEKNFTTAPAICHDGKAHFPREGVFVSNGTHWFVTQ
RNFYEPQIITTDNTFVSGNCDVVIGIVNNTVYDPLQPELDS
SEQ ID NO: 88-(CoV2_RBD_F486N_F460N) mutant Spike (S) protein amino acid
sequence:
AYTNSFTRGVYYPDKVFRSSVLHSTQDLFLPFFSNVTWFHAIHVSGTNGTKRFDNPVLPF
NDGVYFASTEKSNIIRGWIFGTTLDSKTQSLLIVNNATNVVIKVCEFQFCNDPFLGVYYH
KNNKSWMESEFRVYSSANNCTFEYVSQPFLMDLEGKQGNFKNLREFVFKNIDGYFKIYSK
HTPINLVRDLPQGFSALEPLVDLPIGINITRFQTLLALHRSYLTPGDSSSGWTAGAAAYY
VGYLQPRTFLLKYNENGTITDAVDCALDPLSETKCTLKSFTVEKGIYQTSNFRVQPTESI
VRFPNITNLCPFGEVFNATRFASVYAWNRKRISNCVADYSVLYNSASFSTFKCYGVSPTK
LNDLCFTNVYADSFVIRGDEVRQIAPGQTGKIADYNYKLPDDFTGCVIAWNSNNLDSKVG
GNYNYLYRLFRKSNLKPFERDISTEIYQAGSTPCNGVEGNNCYFPLQSYGFQPTNGVGYQ
PYRVVVLSFELLHAPATVCGPKKSTNLVKNKCVNFNFNGLTGTGVLTESNKKFLPFQQFG
RDIADTTDAVRDPQTLEILDITPCSFGGVSVITPGTNTSNQVAVLYQGVNCTEVPVAIHA
DQLTPTWRVYSTGSNVFQTRAGCLIGAEHVNNSYECDIPIGAGICASYQTQTNSPGSASS
VASQSIIAYTMSLGAENSVAYSNNSIAIPTNFTISVTTEILPVSMTKTSVDCTMYICGDS
TECSNLLLQYGSFCTQLNRALTGIAVEQDKNTQEVFAQVKQIYKTPPIKDFGGFNFSQIL
PDPSKPSKRSFIEDLLFNKVTLADAGFIKQYGDCLGDIAARDLICAQKFNGLTVLPPLLT
DEMIAQYTSALLAGTITSGWTFGAGAALQIPFAMQMAYRFNGIGVTQNVLYENQKLIANQ
FNSAIGKIQDSLSSTASALGKLQDVVNQNAQALNTLVKQLSSNFGAISSVLNDILSRLDP
PEAEVQIDRLITGRLQSLQTYVTQQLIRAAEIRASANLAATKMSECVLGQSKRVDFCGKG
YHLMSFPQSAPHGVVFLHVTYVPAQEKNFTTAPAICHDGKAHFPREGVFVSNGTHWFVTQ
RNFYEPQIITTDNTFVSGNCDVVIGIVNNTVYDPLQPELDS
SEQ ID NO: 89-(CoV2_RBD_F486P_F460P) mutant Spike (S) protein amino acid
sequence:
AYTNSFTRGVYYPDKVFRSSVLHSTQDLFLPFFSNVTWFHAIHVSGTNGTKRFDNPVLPF
NDGVYFASTEKSNIIRGWIFGTTLDSKTQSLLIVNNATNVVIKVCEFQFCNDPFLGVYYH
KNNKSWMESEFRVYSSANNCTFEYVSQPFLMDLEGKQGNFKNLREFVFKNIDGYFKIYSK
HTPINLVRDLPQGFSALEPLVDLPIGINITRFQTLLALHRSYLTPGDSSSGWTAGAAAYY
VGYLQPRTFLLKYNENGTITDAVDCALDPLSETKCTLKSFTVEKGIYQTSNFRVQPTESI
VRFPNITNLCPFGEVFNATRFASVYAWNRKRISNCVADYSVLYNSASFSTFKCYGVSPTK
LNDLCFTNVYADSFVIRGDEVRQIAPGQTGKIADYNYKLPDDFTGCVIAWNSNNLDSKVG
GNYNYLYRLFRKSNLKPFERDISTEIYQAGSTPCNGVEGPNCYFPLQSYGFQPTNGVGYQ
PYRVVVLSFELLHAPATVCGPKKSTNLVKNKCVNFNFNGLTGTGVLTESNKKFLPFQQFG
RDIADTTDAVRDPQTLEILDITPCSFGGVSVITPGTNTSNQVAVLYQGVNCTEVPVAIHA
DQLTPTWRVYSTGSNVFQTRAGCLIGAEHVNNSYECDIPIGAGICASYQTQTNSPGSASS
VASQSIIAYTMSLGAENSVAYSNNSIAIPTNFTISVTTEILPVSMTKTSVDCTMYICGDS
TECSNLLLQYGSFCTQLNRALTGIAVEQDKNTQEVFAQVKQIYKTPPIKDFGGFNFSQIL
PDPSKPSKRSFIEDLLFNKVTLADAGFIKQYGDCLGDIAARDLICAQKFNGLTVLPPLLT
DEMIAQYTSALLAGTITSGWTFGAGAALQIPFAMQMAYRFNGIGVTQNVLYENQKLIANQ
FNSAIGKIQDSLSSTASALGKLQDVVNQNAQALNTLVKQLSSNFGAISSVLNDILSRLDP
PEAEVQIDRLITGRLQSLQTYVTQQLIRAAEIRASANLAATKMSECVLGQSKRVDFCGKG
YHLMSFPQSAPHGVVFLHVTYVPAQEKNFTTAPAICHDGKAHFPREGVFVSNGTHWFVTQ
RNFYEPQIITTDNTFVSGNCDVVIGIVNNTVYDPLQPELDS
SEQ ID NO: 90-(CoV2_RBD_F486T_F460T) mutant Spike (S) protein amino acid
sequence:
AYTNSFTRGVYYPDKVFRSSVLHSTQDLFLPFFSNVTWFHAIHVSGTNGTKRFDNPVLPF
NDGVYFASTEKSNIIRGWIFGTTLDSKTQSLLIVNNATNVVIKVCEFQFCNDPFLGVYYH
KNNKSWMESEFRVYSSANNCTFEYVSQPFLMDLEGKQGNFKNLREFVFKNIDGYFKIYSK
HTPINLVRDLPQGFSALEPLVDLPIGINITRFQTLLALHRSYLTPGDSSSGWTAGAAAYY
VGYLQPRTFLLKYNENGTITDAVDCALDPLSETKCTLKSFTVEKGIYQTSNFRVQPTESI
VRFPNITNLCPFGEVFNATRFASVYAWNRKRISNCVADYSVLYNSASFSTFKCYGVSPTK
LNDLCFTNVYADSFVIRGDEVRQIAPGQTGKIADYNYKLPDDFTGCVIAWNSNNLDSKVG
GNYNYLYRLFRKSNLKPFERDISTEIYQAGSTPCNGVEGTNCYFPLQSYGFQPTNGVGYQ
PYRVVVLSFELLHAPATVCGPKKSTNLVKNKCVNFNFNGLTGTGVLTESNKKFLPFQQFG
RDIADTTDAVRDPQTLEILDITPCSFGGVSVITPGTNTSNQVAVLYQGVNCTEVPVAIHA
DQLTPTWRVYSTGSNVFQTRAGCLIGAEHVNNSYECDIPIGAGICASYQTQTNSPGSASS
VASQSIIAYTMSLGAENSVAYSNNSIAIPTNFTISVTTEILPVSMTKTSVDCTMYICGDS
TECSNLLLQYGSFCTQLNRALTGIAVEQDKNTQEVFAQVKQIYKTPPIKDFGGFNFSQIL
PDPSKPSKRSFIEDLLFNKVTLADAGFIKQYGDCLGDIAARDLICAQKFNGLTVLPPLLT
DEMIAQYTSALLAGTITSGWTFGAGAALQIPFAMQMAYRFNGIGVTQNVLYENQKLIANQ
FNSAIGKIQDSLSSTASALGKLQDVVNQNAQALNTLVKQLSSNFGAISSVLNDILSRLDP
PEAEVQIDRLITGRLQSLQTYVTQQLIRAAEIRASANLAATKMSECVLGQSKRVDFCGKG
YHLMSFPQSAPHGVVFLHVTYVPAQEKNFTTAPAICHDGKAHFPREGVFVSNGTHWFVTQ
RNFYEPQIITTDNTFVSGNCDVVIGIVNNTVYDPLQPELDS
SEQ ID NO: 91-(CoV2_RBD_F486W_F460W) mutant Spike (S) protein amino acid
sequence:
AYTNSFTRGVYYPDKVFRSSVLHSTQDLFLPFFSNVTWFHAIHVSGTNGTKRFDNPVLPF
NDGVYFASTEKSNIIRGWIFGTTLDSKTQSLLIVNNATNVVIKVCEFQFCNDPFLGVYYH
KNNKSWMESEFRVYSSANNCTFEYVSQPFLMDLEGKQGNFKNLREFVFKNIDGYFKIYSK
HTPINLVRDLPQGFSALEPLVDLPIGINITRFQTLLALHRSYLTPGDSSSGWTAGAAAYY
VGYLQPRTFLLKYNENGTITDAVDCALDPLSETKCTLKSFTVEKGIYQTSNFRVQPTESI
VRFPNITNLCPFGEVFNATRFASVYAWNRKRISNCVADYSVLYNSASFSTFKCYGVSPTK
LNDLCFTNVYADSFVIRGDEVRQIAPGQTGKIADYNYKLPDDFTGCVIAWNSNNLDSKVG
GNYNYLYRLFRKSNLKPFERDISTEIYQAGSTPCNGVEGWNCYFPLQSYGFQPTNGVGYQ
PYRVVVLSFELLHAPATVCGPKKSTNLVKNKCVNFNFNGLTGTGVLTESNKKFLPFQQFG
RDIADTTDAVRDPQTLEILDITPCSFGGVSVITPGTNTSNQVAVLYQGVNCTEVPVAIHA
DQLTPTWRVYSTGSNVFQTRAGCLIGAEHVNNSYECDIPIGAGICASYQTQTNSPGSASS
VASQSIIAYTMSLGAENSVAYSNNSIAIPTNFTISVTTEILPVSMTKTSVDCTMYICGDS
TECSNLLLQYGSFCTQLNRALTGIAVEQDKNTQEVFAQVKQIYKTPPIKDFGGFNFSQIL
PDPSKPSKRSFIEDLLFNKVTLADAGFIKQYGDCLGDIAARDLICAQKFNGLTVLPPLLT
DEMIAQYTSALLAGTITSGWTFGAGAALQIPFAMQMAYRFNGIGVTQNVLYENQKLIANQ
FNSAIGKIQDSLSSTASALGKLQDVVNQNAQALNTLVKQLSSNFGAISSVLNDILSRLDP
PEAEVQIDRLITGRLQSLQTYVTQQLIRAAEIRASANLAATKMSECVLGQSKRVDFCGKG
YHLMSFPQSAPHGVVFLHVTYVPAQEKNFTTAPAICHDGKAHFPREGVFVSNGTHWFVTQ
RNFYEPQIITTDNTFVSGNCDVVIGIVNNTVYDPLQPELDS
SEQ ID NO: 92-(CoV2_RBD_F486Y_F460Y) mutant Spike (S) protein amino acid
sequence:
AYTNSFTRGVYYPDKVFRSSVLHSTQDLFLPFFSNVTWFHAIHVSGTNGTKRFDNPVLPF
NDGVYFASTEKSNIIRGWIFGTTLDSKTOSLLIVNNATNVVIKVCEFOFCNDPFLGVYYH
KNNKSWMESEFRVYSSANNCTFEYVSQPFLMDLEGKQGNFKNLREEVFKNIDGYFKIYSK
HTPINLVRDLPQGFSALEPLVDLPIGINITRFQTLLALHRSYLTPGDSSSGWTAGAAAYY
VGYLQPRTFLLKYNENGTITDAVDCALDPLSETKCTLKSFTVEKGIYQTSNFRVQPTESI
VRFPNITNLCPFGEVFNATRFASVYAWNRKRISNCVADYSVLYNSASFSTFKCYGVSPTK
LNDLCFTNVYADSFVIRGDEVRQIAPGQTGKIADYNYKLPDDFTGCVIAWNSNNLDSKVG
GNYNYLYRLFRKSNLKPFERDISTEIYQAGSTPCNGVEGYNCYFPLQSYGFQPTNGVGYQ
PYRVVVLSFELLHAPATVCGPKKSTNLVKNKCVNFNFNGLTGTGVLTESNKKFLPFQQFG
RDIADTTDAVRDPQTLEILDITPCSFGGVSVITPGTNTSNQVAVLYQGVNCTEVPVAIHA
DQLTPTWRVYSTGSNVFQTRAGCLIGAEHVNNSYECDIPIGAGICASYQTQTNSPGSASS
VASQSIIAYTMSLGAENSVAYSNNSIAIPTNFTISVTTEILPVSMTKTSVDCTMYICGDS
TECSNLLLQYGSFCTQLNRALTGIAVEQDKNTQEVFAQVKQIYKTPPIKDFGGFNFSQIL
PDPSKPSKRSFIEDLLFNKVTLADAGFIKQYGDCLGDIAARDLICAQKFNGLTVLPPLLT
DEMIAQYTSALLAGTITSGWTFGAGAALQIPFAMQMAYRFNGIGVTQNVLYENQKLIANQ
FNSAIGKIQDSLSSTASALGKLQDVVNQNAQALNTLVKQLSSNFGAISSVLNDILSRLDP
PEAEVQIDRLITGRLQSLQTYVTQQLIRAAEIRASANLAATKMSECVLGQSKRVDFCGKG
YHLMSFPQSAPHGVVFLHVTYVPAQEKNFTTAPAICHDGKAHFPREGVFVSNGTHWFVTQ
RNFYEPQIITTDNTFVSGNCDVVIGIVNNTVYDPLQPELDS
SEQ ID NO: 93-(CoV2_RBD_N487F_N461F) mutant Spike (S) protein amino acid
sequence:
AYTNSFTRGVYYPDKVFRSSVLHSTQDLFLPFFSNVTWFHAIHVSGTNGTKRFDNPVLPF
NDGVYFASTEKSNIIRGWIFGTTLDSKTQSLLIVNNATNVVIKVCEFQFCNDPFLGVYYH
KNNKSWMESEFRVYSSANNCTFEYVSQPFLMDLEGKQGNFKNLREFVFKNIDGYFKIYSK
HTPINLVRDLPQGFSALEPLVDLPIGINITRFQTLLALHRSYLTPGDSSSGWTAGAAAYY
VGYLQPRTFLLKYNENGTITDAVDCALDPLSETKCTLKSFTVEKGIYQTSNFRVQPTESI
VRFPNITNLCPFGEVFNATRFASVYAWNRKRISNCVADYSVLYNSASFSTFKCYGVSPTK
LNDLCFTNVYADSFVIRGDEVRQIAPGQTGKIADYNYKLPDDFTGCVIAWNSNNLDSKVG
GNYNYLYRLFRKSNLKPFERDISTEIYQAGSTPCNGVEGFFCYFPLQSYGFQPTNGVGYQ
PYRVVVLSFELLHAPATVCGPKKSTNLVKNKCVNFNFNGLTGTGVLTESNKKFLPFQQFG
RDIADTTDAVRDPQTLEILDITPCSFGGVSVITPGTNTSNQVAVLYQGVNCTEVPVAIHA
DQLTPTWRVYSTGSNVFQTRAGCLIGAEHVNNSYECDIPIGAGICASYQTQTNSPGSASS
VASQSIIAYTMSLGAENSVAYSNNSIAIPTNFTISVTTEILPVSMTKTSVDCTMYICGDS
TECSNLLLQYGSFCTQLNRALTGIAVEQDKNTQEVFAQVKQIYKTPPIKDFGGFNFSQIL
PDPSKPSKRSFIEDLLFNKVTLADAGFIKQYGDCLGDIAARDLICAQKFNGLTVLPPLLT
DEMIAQYTSALLAGTITSGWTFGAGAALQIPFAMQMAYRFNGIGVTQNVLYENQKLIANQ
FNSAIGKIQDSLSSTASALGKLQDVVNQNAQALNTLVKQLSSNFGAISSVLNDILSRLDP
PEAEVQIDRLITGRLQSLQTYVTQQLIRAAEIRASANLAATKMSECVLGQSKRVDFCGKG
YHLMSFPQSAPHGVVFLHVTYVPAQEKNFTTAPAICHDGKAHFPREGVFVSNGTHWFVTQ
RNFYEPQIITTDNTFVSGNCDVVIGIVNNTVYDPLQPELDS
SEQ ID NO: 94-(CoV2_RBD_N487L_N461L) mutant Spike (S) protein amino acid
sequence:
AYTNSFTRGVYYPDKVFRSSVLHSTQDLFLPFFSNVTWFHAIHVSGTNGTKRFDNPVLPF
NDGVYFASTEKSNIIRGWIFGTTLDSKTQSLLIVNNATNVVIKVCEFQFCNDPFLGVYYH
KNNKSWMESEFRVYSSANNCTFEYVSQPFLMDLEGKQGNFKNLREFVFKNIDGYFKIYSK
HTPINLVRDLPQGFSALEPLVDLPIGINITRFQTLLALHRSYLTPGDSSSGWTAGAAAYY
VGYLQPRTFLLKYNENGTITDAVDCALDPLSETKCTLKSFTVEKGIYQTSNFRVQPTESI
VRFPNITNLCPFGEVFNATRFASVYAWNRKRISNCVADYSVLYNSASFSTFKCYGVSPTK
LNDLCFTNVYADSFVIRGDEVRQIAPGQTGKIADYNYKLPDDFTGCVIAWNSNNLDSKVG
GNYNYLYRLFRKSNLKPFERDISTEIYQAGSTPCNGVEGFLCYFPLQSYGFQPTNGVGYQ
PYRVVVLSFELLHAPATVCGPKKSTNLVKNKCVNFNFNGLTGTGVLTESNKKFLPFQQFG
RDIADTTDAVRDPQTLEILDITPCSFGGVSVITPGTNTSNQVAVLYQGVNCTEVPVAIHA
DQLTPTWRVYSTGSNVFQTRAGCLIGAEHVNNSYECDIPIGAGICASYQTQTNSPGSASS
VASQSIIAYTMSLGAENSVAYSNNSIAIPTNFTISVTTEILPVSMTKTSVDCTMYICGDS
TECSNLLLQYGSFCTQLNRALTGIAVEQDKNTQEVFAQVKQIYKTPPIKDFGGFNFSQIL
PDPSKPSKRSFIEDLLFNKVTLADAGFIKQYGDCLGDIAARDLICAQKFNGLTVLPPLLT
DEMIAQYTSALLAGTITSGWTFGAGAALQIPFAMQMAYRFNGIGVTQNVLYENQKLIANQ
FNSAIGKIQDSLSSTASALGKLQDVVNQNAQALNTLVKQLSSNFGAISSVLNDILSRLDP
PEAEVQIDRLITGRLQSLQTYVTQQLIRAAEIRASANLAATKMSECVLGQSKRVDFCGKG
YHLMSFPQSAPHGVVELHVTYVPAQEKNFTTAPAICHDGKAHFPREGVFVSNGTHWFVTQ
RNFYEPQIITTDNTFVSGNCDVVIGIVNNTVYDPLQPELDS
SEQ ID NO: 95-(CoV2_RBD_N487M_N461M) mutant Spike (S) protein amino acid
sequence:
AYTNSFTRGVYYPDKVFRSSVLHSTQDLFLPFFSNVTWFHAIHVSGTNGTKRFDNPVLPF
NDGVYFASTEKSNIIRGWIFGTTLDSKTQSLLIVNNATNVVIKVCEFQFCNDPFLGVYYH
KNNKSWMESEFRVYSSANNCTFEYVSQPFLMDLEGKQGNFKNLREFVFKNIDGYFKIYSK
HTPINLVRDLPQGFSALEPLVDLPIGINITRFQTLLALHRSYLTPGDSSSGWTAGAAAYY
VGYLQPRTFLLKYNENGTITDAVDCALDPLSETKCTLKSFTVEKGIYQTSNFRVQPTESI
VRFPNITNLCPFGEVFNATRFASVYAWNRKRISNCVADYSVLYNSASFSTFKCYGVSPTK
LNDLCFTNVYADSFVIRGDEVRQIAPGQTGKIADYNYKLPDDFTGCVIAWNSNNLDSKVG
GNYNYLYRLFRKSNLKPFERDISTEIYQAGSTPCNGVEGFMCYFPLQSYGFQPTNGVGYQ
PYRVVVLSFELLHAPATVCGPKKSTNLVKNKCVNFNFNGLTGTGVLTESNKKFLPFQQFG
RDIADTTDAVRDPQTLEILDITPCSFGGVSVITPGTNTSNQVAVLYQGVNCTEVPVAIHA
DQLTPTWRVYSTGSNVFQTRAGCLIGAEHVNNSYECDIPIGAGICASYQTQTNSPGSASS
VASQSIIAYTMSLGAENSVAYSNNSIAIPTNFTISVTTEILPVSMTKTSVDCTMYICGDS
TECSNLLLQYGSFCTQLNRALTGIAVEQDKNTQEVFAQVKQIYKTPPIKDFGGFNFSQIL
PDPSKPSKRSFIEDLLFNKVTLADAGFIKQYGDCLGDIAARDLICAQKFNGLTVLPPLLT
DEMIAQYTSALLAGTITSGWTFGAGAALQIPFAMQMAYRFNGIGVTQNVLYENQKLIANQ
FNSAIGKIQDSLSSTASALGKLQDVVNQNAQALNTLVKQLSSNFGAISSVLNDILSRLDP
PEAEVQIDRLITGRLQSLQTYVTQQLIRAAEIRASANLAATKMSECVLGQSKRVDFCGKG
YHLMSFPQSAPHGVVFLHVTYVPAQEKNFTTAPAICHDGKAHFPREGVFVSNGTHWFVTQ
RNFYEPQIITTDNTFVSGNCDVVIGIVNNTVYDPLQPELDS
SEQ ID NO: 96-(CoV2_RBD_N487Q_N461Q) mutant Spike (S) protein amino acid
sequence:
AYTNSFTRGVYYPDKVFRSSVLHSTQDLFLPFFSNVTWFHAIHVSGTNGTKRFDNPVLPF
NDGVYFASTEKSNIIRGWIFGTTLDSKTQSLLIVNNATNVVIKVCEFQFCNDPFLGVYYH
KNNKSWMESEFRVYSSANNCTFEYVSQPFLMDLEGKQGNFKNLREFVFKNIDGYFKIYSK
HTPINLVRDLPQGFSALEPLVDLPIGINITRFQTLLALHRSYLTPGDSSSGWTAGAAAYY
VGYLQPRTFLLKYNENGTITDAVDCALDPLSETKCTLKSFTVEKGIYQTSNFRVQPTESI
VRFPNITNLCPFGEVFNATRFASVYAWNRKRISNCVADYSVLYNSASFSTFKCYGVSPTK
LNDLCFTNVYADSFVIRGDEVRQIAPGQTGKIADYNYKLPDDFTGCVIAWNSNNLDSKVG
GNYNYLYRLFRKSNLKPFERDISTEIYQAGSTPCNGVEGFQCYFPLQSYGFQPTNGVGYQ
PYRVVVLSFELLHAPATVCGPKKSTNLVKNKCVNFNFNGLTGTGVLTESNKKFLPFQQFG
RDIADTTDAVRDPQTLEILDITPCSFGGVSVITPGTNTSNQVAVLYQGVNCTEVPVAIHA
DQLTPTWRVYSTGSNVFQTRAGCLIGAEHVNNSYECDIPIGAGICASYQTQTNSPGSASS
VASQSIIAYTMSLGAENSVAYSNNSIAIPTNFTISVTTEILPVSMTKTSVDCTMYICGDS
TECSNLLLQYGSFCTQLNRALTGIAVEQDKNTQEVFAQVKQIYKTPPIKDFGGFNFSQIL
PDPSKPSKRSFIEDLLFNKVTLADAGFIKQYGDCLGDIAARDLICAQKFNGLTVLPPLLT
DEMIAQYTSALLAGTITSGWTFGAGAALQIPFAMQMAYRFNGIGVTQNVLYENQKLIANQ
FNSAIGKIQDSLSSTASALGKLQDVVNQNAQALNTLVKQLSSNFGAISSVLNDILSRLDP
PEAEVQIDRLITGRLQSLQTYVTQQLIRAAEIRASANLAATKMSECVLGQSKRVDFCGKG
YHLMSFPQSAPHGVVFLHVTYVPAQEKNFTTAPAICHDGKAHFPREGVFVSNGTHWFVTQ
RNFYEPQIITTDNTFVSGNCDVVIGIVNNTVYDPLQPELDS
SEQ ID NO: 97-(CoV2_RBD_Q493A_Q467A) mutant Spike (S) protein amino acid
sequence:
AYTNSFTRGVYYPDKVFRSSVLHSTQDLFLPFFSNVTWFHAIHVSGTNGTKRFDNPVLPF
NDGVYFASTEKSNIIRGWIFGTTLDSKTQSLLIVNNATNVVIKVCEFQFCNDPFLGVYYH
KNNKSWMESEFRVYSSANNCTFEYVSQPFLMDLEGKQGNFKNLREFVFKNIDGYFKIYSK
HTPINLVRDLPQGFSALEPLVDLPIGINITRFQTLLALHRSYLTPGDSSSGWTAGAAAYY
VGYLQPRTFLLKYNENGTITDAVDCALDPLSETKCTLKSFTVEKGIYQTSNFRVQPTESI
VRFPNITNLCPFGEVFNATRFASVYAWNRKRISNCVADYSVLYNSASFSTFKCYGVSPTK
LNDLCFTNVYADSFVIRGDEVRQIAPGQTGKIADYNYKLPDDFTGCVIAWNSNNLDSKVG
GNYNYLYRLFRKSNLKPFERDISTEIYQAGSTPCNGVEGFNCYFPLASYGFQPTNGVGYQ
PYRVVVLSFELLHAPATVCGPKKSTNLVKNKCVNFNFNGLTGTGVLTESNKKFLPFOOFG
RDIADTTDAVRDPQTLEILDITPCSFGGVSVITPGTNTSNQVAVLYQGVNCTEVPVAIHA
DQLTPTWRVYSTGSNVFQTRAGCLIGAEHVNNSYECDIPIGAGICASYQTQTNSPGSASS
VASQSIIAYTMSLGAENSVAYSNNSIAIPTNFTISVTTEILPVSMTKTSVDCTMYICGDS
TECSNLLLQYGSFCTQLNRALTGIAVEQDKNTQEVFAQVKQIYKTPPIKDFGGFNFSQIL
PDPSKPSKRSFIEDLLFNKVTLADAGFIKQYGDCLGDIAARDLICAQKFNGLTVLPPLLT
DEMIAQYTSALLAGTITSGWTFGAGAALQIPFAMQMAYRFNGIGVTQNVLYENQKLIANQ
FNSAIGKIQDSLSSTASALGKLQDVVNQNAQALNTLVKQLSSNFGAISSVLNDILSRLDP
PEAEVQIDRLITGRLQSLQTYVTQQLIRAAEIRASANLAATKMSECVLGQSKRVDFCGKG
YHLMSFPQSAPHGVVFLHVTYVPAQEKNFTTAPAICHDGKAHFPREGVFVSNGTHWFVTQ
RNFYEPQIITTDNTFVSGNCDVVIGIVNNTVYDPLQPELDS
SEQ ID NO: 98-(CoV2_RBD_Q493Y_Q467Y) mutant Spike (S) protein amino acid
sequence:
AYTNSFTRGVYYPDKVFRSSVLHSTQDLFLPFFSNVTWFHAIHVSGTNGTKRFDNPVLPF
NDGVYFASTEKSNIIRGWIFGTTLDSKTQSLLIVNNATNVVIKVCEFQFCNDPFLGVYYH
KNNKSWMESEFRVYSSANNCTFEYVSQPFLMDLEGKQGNFKNLREFVFKNIDGYFKIYSK
HTPINLVRDLPQGFSALEPLVDLPIGINITRFQTLLALHRSYLTPGDSSSGWTAGAAAYY
VGYLQPRTFLLKYNENGTITDAVDCALDPLSETKCTLKSFTVEKGIYQTSNFRVQPTESI
VRFPNITNLCPFGEVFNATRFASVYAWNRKRISNCVADYSVLYNSASFSTFKCYGVSPTK
LNDLCFTNVYADSFVIRGDEVRQIAPGQTGKIADYNYKLPDDFTGCVIAWNSNNLDSKVG
GNYNYLYRLFRKSNLKPFERDISTEIYQAGSTPCNGVEGFNCYFPLYSYGFQPTNGVGYQ
PYRVVVLSFELLHAPATVCGPKKSTNLVKNKCVNFNFNGLTGTGVLTESNKKFLPFQQFG
RDIADTTDAVRDPQTLEILDITPCSFGGVSVITPGTNTSNQVAVLYQGVNCTEVPVAIHA
DQLTPTWRVYSTGSNVFQTRAGCLIGAEHVNNSYECDIPIGAGICASYQTQTNSPGSASS
VASQSIIAYTMSLGAENSVAYSNNSIAIPTNFTISVTTEILPVSMTKTSVDCTMYICGDS
TECSNLLLQYGSFCTQLNRALTGIAVEQDKNTQEVFAQVKQIYKTPPIKDFGGFNFSQIL
PDPSKPSKRSFIEDLLFNKVTLADAGFIKQYGDCLGDIAARDLICAQKFNGLTVLPPLLT
DEMIAQYTSALLAGTITSGWTFGAGAALQIPFAMQMAYRFNGIGVTQNVLYENQKLIANQ
FNSAIGKIQDSLSSTASALGKLQDVVNQNAQALNTLVKQLSSNFGAISSVLNDILSRLDP
PEAEVQIDRLITGRLQSLQTYVTQQLIRAAEIRASANLAATKMSECVLGQSKRVDFCGKG
YHLMSFPQSAPHGVVFLHVTYVPAQEKNFTTAPAICHDGKAHFPREGVFVSNGTHWFVTQ
RNFYEPQIITTDNTFVSGNCDVVIGIVNNTVYDPLQPELDS
SEQ ID NO: 99-(CoV2_RBD_Q493F_Q467F) mutant Spike (S) protein amino acid
sequence:
AYTNSFTRGVYYPDKVFRSSVLHSTQDLFLPFFSNVTWFHAIHVSGTNGTKRFDNPVLPF
NDGVYFASTEKSNIIRGWIFGTTLDSKTQSLLIVNNATNVVIKVCEFQFCNDPFLGVYYH
KNNKSWMESEFRVYSSANNCTFEYVSQPFLMDLEGKQGNFKNLREFVFKNIDGYFKIYSK
HTPINLVRDLPQGFSALEPLVDLPIGINITRFQTLLALHRSYLTPGDSSSGWTAGAAAYY
VGYLQPRTFLLKYNENGTITDAVDCALDPLSETKCTLKSFTVEKGIYQTSNFRVQPTESI
VRFPNITNLCPFGEVFNATRFASVYAWNRKRISNCVADYSVLYNSASFSTFKCYGVSPTK
LNDLCFTNVYADSFVIRGDEVRQIAPGQTGKIADYNYKLPDDFTGCVIAWNSNNLDSKVG
GNYNYLYRLFRKSNLKPFERDISTEIYQAGSTPCNGVEGFNCYFPLFSYGFQPTNGVGYQ
PYRVVVLSFELLHAPATVCGPKKSTNLVKNKCVNFNFNGLTGTGVLTESNKKFLPFQQFG
RDIADTTDAVRDPQTLEILDITPCSFGGVSVITPGTNTSNQVAVLYQGVNCTEVPVAIHA
DQLTPTWRVYSTGSNVFQTRAGCLIGAEHVNNSYECDIPIGAGICASYQTQTNSPGSASS
VASQSIIAYTMSLGAENSVAYSNNSIAIPTNFTISVTTEILPVSMTKTSVDCTMYICGDS
TECSNLLLQYGSFCTQLNRALTGIAVEQDKNTQEVFAQVKQIYKTPPIKDFGGFNFSQIL
PDPSKPSKRSFIEDLLFNKVTLADAGFIKQYGDCLGDIAARDLICAQKFNGLTVLPPLLT
DEMIAQYTSALLAGTITSGWTFGAGAALQIPFAMQMAYRFNGIGVTQNVLYENQKLIANQ
FNSAIGKIQDSLSSTASALGKLQDVVNQNAQALNTLVKQLSSNFGAISSVLNDILSRLDP
PEAEVQIDRLITGRLQSLQTYVTQQLIRAAEIRASANLAATKMSECVLGQSKRVDFCGKG
YHLMSFPQSAPHGVVFLHVTYVPAQEKNFTTAPAICHDGKAHFPREGVFVSNGTHWFVTQ
RNFYEPQIITTDNTFVSGNCDVVIGIVNNTVYDPLQPELDS
SEQ ID NO: 100-(CoV2_RBD_Q493R_Q467R) mutant Spike (S) protein amino acid
sequence:
AYTNSFTRGVYYPDKVFRSSVLHSTQDLFLPFFSNVTWFHAIHVSGTNGTKRFDNPVLPF
NDGVYFASTEKSNIIRGWIFGTTLDSKTQSLLIVNNATNVVIKVCEFQFCNDPFLGVYYH
KNNKSWMESEFRVYSSANNCTFEYVSQPFLMDLEGKQGNFKNLREFVFKNIDGYFKIYSK
HTPINLVRDLPQGFSALEPLVDLPIGINITRFQTLLALHRSYLTPGDSSSGWTAGAAAYY
VGYLQPRTFLLKYNENGTITDAVDCALDPLSETKCTLKSFTVEKGIYQTSNFRVQPTESI
VRFPNITNLCPFGEVFNATRFASVYAWNRKRISNCVADYSVLYNSASFSTFKCYGVSPTK
LNDLCFTNVYADSFVIRGDEVRQIAPGQTGKIADYNYKLPDDFTGCVIAWNSNNLDSKVG
GNYNYLYRLFRKSNLKPFERDISTEIYQAGSTPCNGVEGFNCYFPLRSYGFQPTNGVGYQ
PYRVVVLSFELLHAPATVCGPKKSTNLVKNKCVNFNFNGLTGTGVLTESNKKFLPFQQFG
RDIADTTDAVRDPQTLEILDITPCSFGGVSVITPGTNTSNQVAVLYQGVNCTEVPVAIHA
DQLTPTWRVYSTGSNVFQTRAGCLIGAEHVNNSYECDIPIGAGICASYQTQTNSPGSASS
VASQSIIAYTMSLGAENSVAYSNNSIAIPTNFTISVTTEILPVSMTKTSVDCTMYICGDS
TECSNLLLQYGSFCTQLNRALTGIAVEQDKNTQEVFAQVKQIYKTPPIKDFGGFNFSQIL
PDPSKPSKRSFIEDLLFNKVTLADAGFIKQYGDCLGDIAARDLICAQKFNGLTVLPPLLT
DEMIAQYTSALLAGTITSGWTFGAGAALQIPFAMQMAYRFNGIGVTQNVLYENQKLIANQ
FNSAIGKIQDSLSSTASALGKLQDVVNQNAQALNTLVKQLSSNFGAISSVLNDILSRLDP
PEAEVQIDRLITGRLQSLQTYVTQQLIRAAEIRASANLAATKMSECVLGQSKRVDFCGKG
YHLMSFPQSAPHGVVFLHVTYVPAQEKNFTTAPAICHDGKAHFPREGVFVSNGTHWFVTQ
RNFYEPQIITTDNTFVSGNCDVVIGIVNNTVYDPLQPELDS
SEQ ID NO: 101-(CoV2_RBD_Q493M_Q467M) mutant Spike (S) protein amino acid
sequence:
AYTNSFTRGVYYPDKVFRSSVLHSTQDLFLPFFSNVTWFHAIHVSGTNGTKRFDNPVLPF
NDGVYFASTEKSNIIRGWIFGTTLDSKTQSLLIVNNATNVVIKVCEFQFCNDPFLGVYYH
KNNKSWMESEFRVYSSANNCTFEYVSQPFLMDLEGKQGNFKNLREFVFKNIDGYFKIYSK
HTPINLVRDLPQGFSALEPLVDLPIGINITRFQTLLALHRSYLTPGDSSSGWTAGAAAYY
VGYLQPRTFLLKYNENGTITDAVDCALDPLSETKCTLKSFTVEKGIYQTSNFRVQPTESI
VRFPNITNLCPFGEVFNATRFASVYAWNRKRISNCVADYSVLYNSASFSTFKCYGVSPTK
LNDLCFTNVYADSFVIRGDEVRQIAPGQTGKIADYNYKLPDDFTGCVIAWNSNNLDSKVG
GNYNYLYRLFRKSNLKPFERDISTEIYQAGSTPCNGVEGFNCYFPLMSYGFQPTNGVGYQ
PYRVVVLSFELLHAPATVCGPKKSTNLVKNKCVNFNFNGLTGTGVLTESNKKFLPFQQFG
RDIADTTDAVRDPQTLEILDITPCSFGGVSVITPGTNTSNQVAVLYQGVNCTEVPVAIHA
DQLTPTWRVYSTGSNVFQTRAGCLIGAEHVNNSYECDIPIGAGICASYQTQTNSPGSASS
VASQSIIAYTMSLGAENSVAYSNNSIAIPTNFTISVTTEILPVSMTKTSVDCTMYICGDS
TECSNLLLQYGSFCTQLNRALTGIAVEQDKNTQEVFAQVKQIYKTPPIKDFGGFNFSQIL
PDPSKPSKRSFIEDLLFNKVTLADAGFIKQYGDCLGDIAARDLICAQKFNGLTVLPPLLT
DEMIAQYTSALLAGTITSGWTFGAGAALQIPFAMQMAYRFNGIGVTQNVLYENQKLIANQ
FNSAIGKIQDSLSSTASALGKLQDVVNQNAQALNTLVKQLSSNFGAISSVLNDILSRLDP
PEAEVQIDRLITGRLQSLQTYVTQQLIRAAEIRASANLAATKMSECVLGQSKRVDFCGKG
YHLMSFPQSAPHGVVFLHVTYVPAQEKNFTTAPAICHDGKAHFPREGVFVSNGTHWFVTQ
RNFYEPQIITTDNTFVSGNCDVVIGIVNNTVYDPLQPELDS
SEQ ID NO: 102-(CoV2_RBD_Q493C_Q467C) mutant Spike (S) protein amino acid
sequence:
AYTNSFTRGVYYPDKVFRSSVLHSTQDLFLPFFSNVTWFHAIHVSGTNGTKRFDNPVLPF
NDGVYFASTEKSNIIRGWIFGTTLDSKTQSLLIVNNATNVVIKVCEFQFCNDPFLGVYYH
KNNKSWMESEFRVYSSANNCTFEYVSQPFLMDLEGKQGNFKNLREFVFKNIDGYFKIYSK
HTPINLVRDLPQGFSALEPLVDLPIGINITRFQTLLALHRSYLTPGDSSSGWTAGAAAYY
VGYLQPRTFLLKYNENGTITDAVDCALDPLSETKCTLKSFTVEKGIYQTSNFRVQPTESI
VRFPNITNLCPFGEVFNATRFASVYAWNRKRISNCVADYSVLYNSASFSTFKCYGVSPTK
LNDLCFTNVYADSFVIRGDEVRQIAPGQTGKIADYNYKLPDDFTGCVIAWNSNNLDSKVG
GNYNYLYRLFRKSNLKPFERDISTEIYQAGSTPCNGVEGFNCYFPLCSYGFQPTNGVGYQ
PYRVVVLSFELLHAPATVCGPKKSTNLVKNKCVNFNFNGLTGTGVLTESNKKFLPFQQFG
RDIADTTDAVRDPQTLEILDITPCSFGGVSVITPGTNTSNQVAVLYQGVNCTEVPVAIHA
DQLTPTWRVYSTGSNVFQTRAGCLIGAEHVNNSYECDIPIGAGICASYQTQTNSPGSASS
VASQSIIAYTMSLGAENSVAYSNNSIAIPTNFTISVTTEILPVSMTKTSVDCTMYICGDS
TECSNLLLQYGSFCTQLNRALTGIAVEQDKNTQEVFAQVKQIYKTPPIKDFGGFNFSQIL
PDPSKPSKRSFIEDLLFNKVTLADAGFIKQYGDCLGDIAARDLICAQKFNGLTVLPPLLT
DEMIAQYTSALLAGTITSGWTFGAGAALQIPFAMQMAYRFNGIGVTQNVLYENQKLIANQ
FNSAIGKIQDSLSSTASALGKLQDVVNQNAQALNTLVKQLSSNFGAISSVLNDILSRLDP
PEAEVQIDRLITGRLQSLQTYVTQQLIRAAEIRASANLAATKMSECVLGQSKRVDFCGKG
YHLMSFPQSAPHGVVFLHVTYVPAQEKNFTTAPAICHDGKAHFPREGVFVSNGTHWFVTQ
RNFYEPQIITTDNTFVSGNCDVVIGIVNNTVYDPLQPELDS
SEQ ID NO: 103-(CoV2_RBD_Q493G_Q467G) mutant Spike (S) protein amino acid
sequence:
AYTNSFTRGVYYPDKVFRSSVLHSTQDLFLPFFSNVTWFHAIHVSGTNGTKRFDNPVLPF
NDGVYFASTEKSNIIRGWIFGTTLDSKTQSLLIVNNATNVVIKVCEFQFCNDPFLGVYYH
KNNKSWMESEFRVYSSANNCTFEYVSQPFLMDLEGKQGNFKNLREFVFKNIDGYFKIYSK
HTPINLVRDLPQGFSALEPLVDLPIGINITRFQTLLALHRSYLTPGDSSSGWTAGAAAYY
VGYLQPRTFLLKYNENGTITDAVDCALDPLSETKCTLKSFTVEKGIYQTSNFRVQPTESI
VRFPNITNLCPFGEVFNATRFASVYAWNRKRISNCVADYSVLYNSASFSTFKCYGVSPTK
LNDLCFTNVYADSFVIRGDEVRQIAPGQTGKIADYNYKLPDDFTGCVIAWNSNNLDSKVG
GNYNYLYRLFRKSNLKPFERDISTEIYQAGSTPCNGVEGFNCYFPLGSYGFQPTNGVGYQ
PYRVVVLSFELLHAPATVCGPKKSTNLVKNKCVNFNFNGLTGTGVLTESNKKFLPFQQFG
RDIADTTDAVRDPQTLEILDITPCSFGGVSVITPGTNTSNQVAVLYQGVNCTEVPVAIHA
DQLTPTWRVYSTGSNVFQTRAGCLIGAEHVNNSYECDIPIGAGICASYQTQTNSPGSASS
VASQSIIAYTMSLGAENSVAYSNNSIAIPTNFTISVTTEILPVSMTKTSVDCTMYICGDS
TECSNLLLQYGSFCTQLNRALTGIAVEQDKNTQEVFAQVKQIYKTPPIKDFGGFNFSQIL
PDPSKPSKRSFIEDLLFNKVTLADAGFIKQYGDCLGDIAARDLICAQKFNGLTVLPPLLT
DEMIAQYTSALLAGTITSGWTFGAGAALQIPFAMQMAYRFNGIGVTQNVLYENQKLIANQ
FNSAIGKIQDSLSSTASALGKLQDVVNQNAQALNTLVKQLSSNFGAISSVLNDILSRLDP
PEAEVQIDRLITGRLQSLQTYVTQQLIRAAEIRASANLAATKMSECVLGQSKRVDFCGKG
YHLMSFPQSAPHGVVFLHVTYVPAQEKNFTTAPAICHDGKAHFPREGVFVSNGTHWFVTQ
RNFYEPQIITTDNTFVSGNCDVVIGIVNNTVYDPLQPELDS
SEQ ID NO: 104-(CoV2_RBD_Q493V_Q467V) mutant Spike (S) protein amino acid
sequence:
AYTNSFTRGVYYPDKVFRSSVLHSTQDLFLPFFSNVTWFHAIHVSGTNGTKRFDNPVLPF
NDGVYFASTEKSNIIRGWIFGTTLDSKTQSLLIVNNATNVVIKVCEFQFCNDPFLGVYYH
KNNKSWMESEFRVYSSANNCTFEYVSQPFLMDLEGKQGNFKNLREFVFKNIDGYFKIYSK
HTPINLVRDLPQGFSALEPLVDLPIGINITRFQTLLALHRSYLTPGDSSSGWTAGAAAYY
VGYLQPRTFLLKYNENGTITDAVDCALDPLSETKCTLKSFTVEKGIYQTSNFRVQPTESI
VRFPNITNLCPFGEVFNATRFASVYAWNRKRISNCVADYSVLYNSASFSTFKCYGVSPTK
LNDLCFTNVYADSFVIRGDEVRQIAPGQTGKIADYNYKLPDDFTGCVIAWNSNNLDSKVG
GNYNYLYRLFRKSNLKPFERDISTEIYQAGSTPCNGVEGFNCYFPLVSYGFQPTNGVGYQ
PYRVVVLSFELLHAPATVCGPKKSTNLVKNKCVNFNFNGLTGTGVLTESNKKFLPFQQFG
RDIADTTDAVRDPQTLEILDITPCSFGGVSVITPGTNTSNQVAVLYQGVNCTEVPVAIHA
DQLTPTWRVYSTGSNVFQTRAGCLIGAEHVNNSYECDIPIGAGICASYQTQTNSPGSASS
VASQSIIAYTMSLGAENSVAYSNNSIAIPTNFTISVTTEILPVSMTKTSVDCTMYICGDS
TECSNLLLQYGSFCTQLNRALTGIAVEQDKNTQEVFAQVKQIYKTPPIKDFGGFNFSQIL
PDPSKPSKRSFIEDLLFNKVTLADAGFIKQYGDCLGDIAARDLICAQKFNGLTVLPPLLT
DEMIAQYTSALLAGTITSGWTFGAGAALQIPFAMQMAYRFNGIGVTQNVLYENQKLIANQ
FNSAIGKIQDSLSSTASALGKLQDVVNQNAQALNTLVKQLSSNFGAISSVLNDILSRLDP
PEAEVQIDRLITGRLQSLQTYVTQQLIRAAEIRASANLAATKMSECVLGQSKRVDFCGKG
YHLMSFPQSAPHGVVFLHVTYVPAQEKNFTTAPAICHDGKAHFPREGVFVSNGTHWFVTQ
RNFYEPQIITTDNTFVSGNCDVVIGIVNNTVYDPLQPELDS
SEQ ID NO: 105-(CoV2_RBD_K417N_A419T_K391N_A393T) mutant Spike (S) protein
amino acid sequence:
AYTNSFTRGVYYPDKVFRSSVLHSTQDLFLPFFSNVTWFHAIHVSGTNGTKRFDNPVLPF
NDGVYFASTEKSNIIRGWIFGTTLDSKTQSLLIVNNATNVVIKVCEFQFCNDPFLGVYYH
KNNKSWMESEFRVYSSANNCTFEYVSQPFLMDLEGKQGNFKNLREFVFKNIDGYFKIYSK
HTPINLVRDLPQGFSALEPLVDLPIGINITRFQTLLALHRSYLTPGDSSSGWTAGAAAYY
VGYLQPRTFLLKYNENGTITDAVDCALDPLSETKCTLKSFTVEKGIYQTSNFRVQPTESI
VRFPNITNLCPFGEVFNATRFASVYAWNRKRISNCVADYSVLYNSASFSTFKCYGVSPTK
LNDLCFTNVYADSFVIRGDEVRQIAPGQTGNITDYNYKLPDDFTGCVIAWNSNNLDSKVG
GNYNYLYRLFRKSNLKPFERDISTEIYQAGSTPCNGVEGFNCYFPLQSYGFQPTNGVGYQ
PYRVVVLSFELLHAPATVCGPKKSTNLVKNKCVNFNENGLTGTGVLTESNKKFLPFQQFG
RDIADTTDAVRDPQTLEILDITPCSFGGVSVITPGTNTSNQVAVLYQGVNCTEVPVAIHA
DQLTPTWRVYSTGSNVFQTRAGCLIGAEHVNNSYECDIPIGAGICASYQTQTNSPGSASS
VASQSIIAYTMSLGAENSVAYSNNSIAIPTNFTISVTTEILPVSMTKTSVDCTMYICGDS
TECSNLLLQYGSFCTQLNRALTGIAVEQDKNTQEVFAQVKQIYKTPPIKDFGGFNFSQIL
PDPSKPSKRSFIEDLLFNKVTLADAGFIKQYGDCLGDIAARDLICAQKFNGLTVLPPLLT
DEMIAQYTSALLAGTITSGWTFGAGAALQIPFAMQMAYRFNGIGVTQNVLYENQKLIANQ
FNSAIGKIQDSLSSTASALGKLQDVVNQNAQALNTLVKQLSSNFGAISSVLNDILSRLDP
PEAEVQIDRLITGRLQSLQTYVTQQLIRAAEIRASANLAATKMSECVLGQSKRVDFCGKG
YHLMSFPQSAPHGVVFLHVTYVPAQEKNFTTAPAICHDGKAHFPREGVFVSNGTHWFVTQ
RNFYEPQIITTDNTFVSGNCDVVIGIVNNTVYDPLQPELDS
SEQ ID NO: 106-(CoV2_RBD_Y449N_Y451T_Y423N_Y425T) mutant Spike (S) protein
amino acid sequence:
AYTNSFTRGVYYPDKVFRSSVLHSTQDLFLPFFSNVTWFHAIHVSGTNGTKRFDNPVLPF
NDGVYFASTEKSNIIRGWIFGTTLDSKTQSLLIVNNATNVVIKVCEFQFCNDPFLGVYYH
KNNKSWMESEFRVYSSANNCTFEYVSQPFLMDLEGKQGNFKNLREFVFKNIDGYFKIYSK
HTPINLVRDLPQGFSALEPLVDLPIGINITRFQTLLALHRSYLTPGDSSSGWTAGAAAYY
VGYLQPRTFLLKYNENGTITDAVDCALDPLSETKCTLKSFTVEKGIYQTSNFRVQPTESI
VRFPNITNLCPFGEVFNATRFASVYAWNRKRISNCVADYSVLYNSASFSTFKCYGVSPTK
LNDLCFTNVYADSFVIRGDEVRQIAPGQTGKIADYNYKLPDDFTGCVIAWNSNNLDSKVG
GNNNTLYRLFRKSNLKPFERDISTEIYQAGSTPCNGVEGFNCYFPLQSYGFQPTNGVGYQ
PYRVVVLSFELLHAPATVCGPKKSTNLVKNKCVNFNFNGLTGTGVLTESNKKFLPFQQFG
RDIADTTDAVRDPQTLEILDITPCSFGGVSVITPGTNTSNQVAVLYQGVNCTEVPVAIHA
DQLTPTWRVYSTGSNVFQTRAGCLIGAEHVNNSYECDIPIGAGICASYQTQTNSPGSASS
VASQSIIAYTMSLGAENSVAYSNNSIAIPTNFTISVTTEILPVSMTKTSVDCTMYICGDS
TECSNLLLQYGSFCTQLNRALTGIAVEQDKNTQEVFAQVKQIYKTPPIKDFGGFNFSQIL
PDPSKPSKRSFIEDLLFNKVTLADAGFIKQYGDCLGDIAARDLICAQKFNGLTVLPPLLT
DEMIAQYTSALLAGTITSGWTFGAGAALQIPFAMQMAYRFNGIGVTQNVLYENQKLIANQ
FNSAIGKIQDSLSSTASALGKLQDVVNQNAQALNTLVKQLSSNFGAISSVLNDILSRLDP
PEAEVQIDRLITGRLQSLQTYVTQQLIRAAEIRASANLAATKMSECVLGQSKRVDFCGKG
YHLMSFPQSAPHGVVFLHVTYVPAQEKNFTTAPAICHDGKAHFPREGVFVSNGTHWFVTQ
RNFYEPQIITTDNTFVSGNCDVVIGIVNNTVYDPLQPELDS
SEQ ID NO: 107-(CoV2_RBD_Y453N_L455T_Y427N_L429T) mutant Spike (S) protein
amino acid sequence:
AYTNSFTRGVYYPDKVFRSSVLHSTQDLFLPFFSNVTWFHAIHVSGTNGTKRFDNPVLPF
NDGVYFASTEKSNIIRGWIFGTTLDSKTQSLLIVNNATNVVIKVCEFQFCNDPFLGVYYH
KNNKSWMESEFRVYSSANNCTFEYVSQPFLMDLEGKQGNFKNLREFVFKNIDGYFKIYSK
HTPINLVRDLPQGFSALEPLVDLPIGINITRFQTLLALHRSYLTPGDSSSGWTAGAAAYY
VGYLQPRTFLLKYNENGTITDAVDCALDPLSETKCTLKSFTVEKGIYQTSNFRVQPTESI
VRFPNITNLCPFGEVFNATRFASVYAWNRKRISNCVADYSVLYNSASFSTFKCYGVSPTK
LNDLCFTNVYADSFVIRGDEVRQIAPGQTGKIADYNYKLPDDFTGCVIAWNSNNLDSKVG
GNYNYLNRTFRKSNLKPFERDISTEIYQAGSTPCNGVEGFNCYFPLQSYGFQPTNGVGYQ
PYRVVVLSFELLHAPATVCGPKKSTNLVKNKCVNFNFNGLTGTGVLTESNKKFLPFQQFG
RDIADTTDAVRDPQTLEILDITPCSFGGVSVITPGTNTSNQVAVLYQGVNCTEVPVAIHA
DQLTPTWRVYSTGSNVFQTRAGCLIGAEHVNNSYECDIPIGAGICASYQTQTNSPGSASS
VASQSIIAYTMSLGAENSVAYSNNSIAIPTNFTISVTTEILPVSMTKTSVDCTMYICGDS
TECSNLLLQYGSFCTQLNRALTGIAVEQDKNTQEVFAQVKQIYKTPPIKDFGGFNFSQIL
PDPSKPSKRSFIEDLLFNKVTLADAGFIKQYGDCLGDIAARDLICAQKFNGLTVLPPLLT
DEMIAQYTSALLAGTITSGWTFGAGAALQIPFAMQMAYRFNGIGVTQNVLYENQKLIANQ
FNSAIGKIQDSLSSTASALGKLQDVVNQNAQALNTLVKQLSSNFGAISSVLNDILSRLDP
PEAEVQIDRLITGRLQSLQTYVTQQLIRAAEIRASANLAATKMSECVLGQSKRVDFCGKG
YHLMSFPQSAPHGVVFLHVTYVPAQEKNFTTAPAICHDGKAHFPREGVFVSNGTHWFVTQ
RNFYEPQIITTDNTFVSGNCDVVIGIVNNTVYDPLQPELDS
SEQ ID NO: 108-(CoV2_RBD_L455N_R457T_L429N_R431T) mutant Spike (S) protein
amino acid sequence:
AYTNSETRGVYYPDKVFRSSVLHSTQDLFLPFFSNVTWFHAIHVSGTNGTKRFDNPVLPE
NDGVYFASTEKSNIIRGWIFGTTLDSKTQSLLIVNNATNVVIKVCEFQFCNDPFLGVYYH
KNNKSWMESEFRVYSSANNCTFEYVSQPFLMDLEGKQGNFKNLREFVFKNIDGYFKIYSK
HTPINLVRDLPQGFSALEPLVDLPIGINITRFQTLLALHRSYLTPGDSSSGWTAGAAAYY
VGYLQPRTFLLKYNENGTITDAVDCALDPLSETKCTLKSFTVEKGIYQTSNFRVQPTESI
VRFPNITNLCPFGEVFNATRFASVYAWNRKRISNCVADYSVLYNSASFSTFKCYGVSPTK
LNDLCFTNVYADSFVIRGDEVRQIAPGQTGKIADYNYKLPDDFTGCVIAWNSNNLDSKVG
GNYNYLYRNFTKSNLKPFERDISTEIYQAGSTPCNGVEGFNCYFPLQSYGFQPTNGVGYQ
PYRVVVLSFELLHAPATVCGPKKSTNLVKNKCVNFNFNGLTGTGVLTESNKKFLPFQQFG
RDIADTTDAVRDPQTLEILDITPCSFGGVSVITPGTNTSNQVAVLYQGVNCTEVPVAIHA
DQLTPTWRVYSTGSNVFQTRAGCLIGAEHVNNSYECDIPIGAGICASYQTQTNSPGSASS
VASQSIIAYTMSLGAENSVAYSNNSIAIPTNFTISVTTEILPVSMTKTSVDCTMYICGDS
TECSNLLLQYGSFCTQLNRALTGIAVEQDKNTQEVFAQVKQIYKTPPIKDFGGFNFSQIL
PDPSKPSKRSFIEDLLFNKVTLADAGFIKQYGDCLGDIAARDLICAQKFNGLTVLPPLLT
DEMIAQYTSALLAGTITSGWTFGAGAALQIPFAMQMAYRFNGIGVTQNVLYENQKLIANQ
FNSAIGKIQDSLSSTASALGKLQDVVNQNAQALNTLVKQLSSNFGAISSVLNDILSRLDP
PEAEVQIDRLITGRLQSLQTYVTQQLIRAAEIRASANLAATKMSECVLGQSKRVDFCGKG
YHLMSFPQSAPHGVVFLHVTYVPAQEKNFTTAPAICHDGKAHFPREGVFVSNGTHWFVTQ
RNFYEPQIITTDNTFVSGNCDVVIGIVNNTVYDPLQPELDS
SEQ ID NO: 109-(CoV2_RBD_F456N_K458T_F430N_K432T) mutant Spike (S) protein
amino acid sequence:
AYTNSFTRGVYYPDKVFRSSVLHSTQDLFLPFFSNVTWFHAIHVSGTNGTKRFDNPVLPF
NDGVYFASTEKSNIIRGWIFGTTLDSKTQSLLIVNNATNVVIKVCEFQFCNDPFLGVYYH
KNNKSWMESEFRVYSSANNCTFEYVSQPFLMDLEGKQGNFKNLREFVFKNIDGYFKIYSK
HTPINLVRDLPQGFSALEPLVDLPIGINITRFQTLLALHRSYLTPGDSSSGWTAGAAAYY
VGYLQPRTFLLKYNENGTITDAVDCALDPLSETKCTLKSFTVEKGIYQTSNFRVQPTESI
VRFPNITNLCPFGEVFNATRFASVYAWNRKRISNCVADYSVLYNSASFSTFKCYGVSPTK
LNDLCFTNVYADSFVIRGDEVRQIAPGQTGKIADYNYKLPDDFTGCVIAWNSNNLDSKVG
GNYNYLYRLNRTSNLKPFERDISTEIYQAGSTPCNGVEGFNCYFPLQSYGFQPTNGVGYQ
PYRVVVLSFELLHAPATVCGPKKSTNLVKNKCVNFNFNGLTGTGVLTESNKKFLPFQQFG
RDIADTTDAVRDPQTLEILDITPCSFGGVSVITPGTNTSNQVAVLYQGVNCTEVPVAIHA
DQLTPTWRVYSTGSNVFQTRAGCLIGAEHVNNSYECDIPIGAGICASYQTQTNSPGSASS
VASQSIIAYTMSLGAENSVAYSNNSIAIPTNFTISVTTEILPVSMTKTSVDCTMYICGDS
TECSNLLLQYGSFCTQLNRALTGIAVEQDKNTQEVFAQVKQIYKTPPIKDFGGFNFSQIL
PDPSKPSKRSFIEDLLFNKVTLADAGFIKQYGDCLGDIAARDLICAQKFNGLTVLPPLLT
DEMIAQYTSALLAGTITSGWTFGAGAALQIPFAMQMAYRFNGIGVTQNVLYENQKLIANQ
FNSAIGKIQDSLSSTASALGKLQDVVNQNAQALNTLVKQLSSNFGAISSVLNDILSRLDP
PEAEVQIDRLITGRLQSLQTYVTQQLIRAAEIRASANLAATKMSECVLGQSKRVDFCGKG
YHLMSFPQSAPHGVVFLHVTYVPAQEKNFTTAPAICHDGKAHFPREGVFVSNGTHWFVTQ
RNFYEPQIITTDNTFVSGNCDVVIGIVNNTVYDPLQPELDS
SEQ ID NO: 110-(CoV2_RBD_Y473N_A475T_Y447N_A449T) mutant Spike (S) protein
amino acid sequence:
AYTNSFTRGVYYPDKVFRSSVLHSTQDLFLPFFSNVTWFHAIHVSGTNGTKRFDNPVLPF
NDGVYFASTEKSNIIRGWIFGTTLDSKTQSLLIVNNATNVVIKVCEFQFCNDPFLGVYYH
KNNKSWMESEFRVYSSANNCTFEYVSQPFLMDLEGKQGNFKNLREFVFKNIDGYFKIYSK
HTPINLVRDLPQGFSALEPLVDLPIGINITRFQTLLALHRSYLTPGDSSSGWTAGAAAYY
VGYLQPRTFLLKYNENGTITDAVDCALDPLSETKCTLKSFTVEKGIYQTSNFRVQPTESI
VRFPNITNLCPFGEVFNATRFASVYAWNRKRISNCVADYSVLYNSASFSTFKCYGVSPTK
LNDLCFTNVYADSFVIRGDEVRQIAPGQTGKIADYNYKLPDDFTGCVIAWNSNNLDSKVG
GNYNYLYRLFRKSNLKPFERDISTEINQTGSTPCNGVEGFNCYFPLQSYGFQPTNGVGYQ
PYRVVVLSFELLHAPATVCGPKKSTNLVKNKCVNFNFNGLTGTGVLTESNKKFLPFQQFG
RDIADTTDAVRDPQTLEILDITPCSFGGVSVITPGTNTSNQVAVLYQGVNCTEVPVAIHA
DQLTPTWRVYSTGSNVFQTRAGCLIGAEHVNNSYECDIPIGAGICASYQTQTNSPGSASS
VASQSIIAYTMSLGAENSVAYSNNSIAIPTNFTISVTTEILPVSMTKTSVDCTMYICGDS
TECSNLLLQYGSFCTQLNRALTGIAVEQDKNTQEVFAQVKQIYKTPPIKDFGGFNFSQIL
PDPSKPSKRSFIEDLLFNKVTLADAGFIKQYGDCLGDIAARDLICAQKFNGLTVLPPLLT
DEMIAQYTSALLAGTITSGWTFGAGAALQIPFAMQMAYRFNGIGVTQNVLYENQKLIANQ
FNSAIGKIQDSLSSTASALGKLQDVVNQNAQALNTLVKQLSSNFGAISSVLNDILSRLDP
PEAEVQIDRLITGRLQSLQTYVTQQLIRAAEIRASANLAATKMSECVLGQSKRVDFCGKG
YHLMSFPQSAPHGVVFLHVTYVPAQEKNFTTAPAICHDGKAHFPREGVFVSNGTHWFVTQ
RNFYEPQIITTDNTFVSGNCDVVIGIVNNTVYDPLQPELDS
SEQ ID NO: 111-(CoV2_RBD_A475N_S477T_A449N_S451T) mutant Spike (S) protein
amino acid sequence:
AYTNSFTRGVYYPDKVFRSSVLHSTQDLFLPFFSNVTWFHAIHVSGTNGTKRFDNPVLPF
NDGVYFASTEKSNIIRGWIFGTTLDSKTQSLLIVNNATNVVIKVCEFQFCNDPFLGVYYH
KNNKSWMESEFRVYSSANNCTFEYVSQPFLMDLEGKQGNFKNLREFVFKNIDGYFKIYSK
HTPINLVRDLPQGFSALEPLVDLPIGINITRFQTLLALHRSYLTPGDSSSGWTAGAAAYY
VGYLQPRTFLLKYNENGTITDAVDCALDPLSETKCTLKSFTVEKGIYQTSNFRVQPTESI
VRFPNITNLCPFGEVFNATRFASVYAWNRKRISNCVADYSVLYNSASFSTFKCYGVSPTK
LNDLCFTNVYADSFVIRGDEVRQIAPGQTGKIADYNYKLPDDFTGCVIAWNSNNLDSKVG
GNYNYLYRLFRKSNLKPFERDISTEIYQNGTTPCNGVEGFNCYFPLQSYGFQPTNGVGYQ
PYRVVVLSFELLHAPATVCGPKKSTNLVKNKCVNFNFNGLTGTGVLTESNKKFLPFQQFG
RDIADTTDAVRDPQTLEILDITPCSFGGVSVITPGTNTSNQVAVLYQGVNCTEVPVAIHA
DQLTPTWRVYSTGSNVFQTRAGCLIGAEHVNNSYECDIPIGAGICASYQTQTNSPGSASS
VASQSIIAYTMSLGAENSVAYSNNSIAIPTNFTISVTTEILPVSMTKTSVDCTMYICGDS
TECSNLLLQYGSFCTQLNRALTGIAVEQDKNTQEVFAQVKQIYKTPPIKDFGGFNFSQIL
PDPSKPSKRSFIEDLLFNKVTLADAGFIKQYGDCLGDIAARDLICAQKFNGLTVLPPLLT
DEMIAQYTSALLAGTITSGWTFGAGAALQIPFAMQMAYRFNGIGVTQNVLYENQKLIANQ
FNSAIGKIQDSLSSTASALGKLQDVVNQNAQALNTLVKQLSSNFGAISSVLNDILSRLDP
PEAEVQIDRLITGRLQSLQTYVTQQLIRAAEIRASANLAATKMSECVLGQSKRVDFCGKG
YHLMSFPQSAPHGVVFLHVTYVPAQEKNFTTAPAICHDGKAHFPREGVFVSNGTHWFVTQ
RNFYEPQIITTDNTFVSGNCDVVIGIVNNTVYDPLQPELDS
SEQ ID NO: 112-(CoV2_RBD_G476N_G450N) mutant Spike (S) protein amino acid
sequence:
AYTNSFTRGVYYPDKVFRSSVLHSTQDLFLPFFSNVTWFHAIHVSGTNGTKRFDNPVLPF
NDGVYFASTEKSNIIRGWIFGTTLDSKTQSLLIVNNATNVVIKVCEFQFCNDPFLGVYYH
KNNKSWMESEFRVYSSANNCTFEYVSQPFLMDLEGKQGNFKNLREFVFKNIDGYFKIYSK
HTPINLVRDLPQGFSALEPLVDLPIGINITRFQTLLALHRSYLTPGDSSSGWTAGAAAYY
VGYLQPRTFLLKYNENGTITDAVDCALDPLSETKCTLKSFTVEKGIYQTSNFRVQPTESI
VRFPNITNLCPFGEVFNATRFASVYAWNRKRISNCVADYSVLYNSASFSTFKCYGVSPTK
LNDLCFTNVYADSFVIRGDEVRQIAPGQTGKIADYNYKLPDDFTGCVIAWNSNNLDSKVG
GNYNYLYRLFRKSNLKPFERDISTEIYQANSTPCNGVEGFNCYFPLQSYGFQPTNGVGYQ
PYRVVVLSFELLHAPATVCGPKKSTNLVKNKCVNFNFNGLTGTGVLTESNKKFLPFQQFG
RDIADTTDAVRDPQTLEILDITPCSFGGVSVITPGTNTSNQVAVLYQGVNCTEVPVAIHA
DQLTPTWRVYSTGSNVFQTRAGCLIGAEHVNNSYECDIPIGAGICASYQTQTNSPGSASS
VASQSIIAYTMSLGAENSVAYSNNSIAIPTNFTISVTTEILPVSMTKTSVDCTMYICGDS
TECSNLLLQYGSFCTQLNRALTGIAVEQDKNTQEVFAQVKQIYKTPPIKDFGGFNFSQIL
PDPSKPSKRSFIEDLLFNKVTLADAGFIKQYGDCLGDIAARDLICAQKFNGLTVLPPLLT
DEMIAQYTSALLAGTITSGWTFGAGAALQIPFAMQMAYRFNGIGVTQNVLYENQKLIANQ
FNSAIGKIQDSLSSTASALGKLQDVVNQNAQALNTLVKQLSSNFGAISSVLNDILSRLDP
PEAEVQIDRLITGRLQSLQTYVTQQLIRAAEIRASANLAATKMSECVLGQSKRVDFCGKG
YHLMSFPQSAPHGVVFLHVTYVPAQEKNFTTAPAICHDGKAHFPREGVFVSNGTHWFVTQ
RNFYEPQIITTDNTFVSGNCDVVIGIVNNTVYDPLQPELDS
SEQ ID NO: 113-(CoV2_RBD_Y489T_Y463T) mutant Spike (S) protein amino acid
sequence:
AYTNSFTRGVYYPDKVFRSSVLHSTQDLFLPFFSNVTWFHAIHVSGTNGTKRFDNPVLPF
NDGVYFASTEKSNIIRGWIFGTTLDSKTQSLLIVNNATNVVIKVCEFQFCNDPFLGVYYH
KNNKSWMESEFRVYSSANNCTFEYVSQPFLMDLEGKQGNFKNLREFVFKNIDGYFKIYSK
HTPINLVRDLPQGFSALEPLVDLPIGINITRFQTLLALHRSYLTPGDSSSGWTAGAAAYY
VGYLQPRTFLLKYNENGTITDAVDCALDPLSETKCTLKSFTVEKGIYQTSNFRVQPTESI
VRFPNITNLCPFGEVFNATRFASVYAWNRKRISNCVADYSVLYNSASFSTFKCYGVSPTK
LNDLCFTNVYADSFVIRGDEVRQIAPGQTGKIADYNYKLPDDFTGCVIAWNSNNLDSKVG
GNYNYLYRLFRKSNLKPFERDISTEIYQAGSTPCNGVEGFNCTFPLQSYGFQPTNGVGYQ
PYRVVVLSFELLHAPATVCGPKKSTNLVKNKCVNFNFNGLTGTGVLTESNKKFLPFQQFG
RDIADTTDAVRDPQTLEILDITPCSFGGVSVITPGTNTSNQVAVLYQGVNCTEVPVAIHA
DQLTPTWRVYSTGSNVFQTRAGCLIGAEHVNNSYECDIPIGAGICASYQTQTNSPGSASS
VASQSIIAYTMSLGAENSVAYSNNSIAIPTNFTISVTTEILPVSMTKTSVDCTMYICGDS
TECSNLLLQYGSFCTQLNRALTGIAVEQDKNTQEVFAQVKQIYKTPPIKDFGGFNFSQIL
PDPSKPSKRSFIEDLLFNKVTLADAGFIKQYGDCLGDIAARDLICAQKFNGLTVLPPLLT
DEMIAQYTSALLAGTITSGWTFGAGAALQIPFAMQMAYRFNGIGVTQNVLYENQKLIANQ
FNSAIGKIQDSLSSTASALGKLQDVVNQNAQALNTLVKQLSSNFGAISSVLNDILSRLDP
PEAEVQIDRLITGRLQSLQTYVTQQLIRAAEIRASANLAATKMSECVLGQSKRVDFCGKG
YHLMSFPQSAPHGVVFLHVTYVPAQEKNFTTAPAICHDGKAHFPREGVFVSNGTHWFVTQ
RNFYEPQIITTDNTFVSGNCDVVIGIVNNTVYDPLQPELDS
SEQ ID NO: 114-(CoV2_RBD_Q493N_Y495T_Q467N_Y469T) mutant Spike (S) protein
amino acid sequence:
AYTNSFTRGVYYPDKVFRSSVLHSTQDLFLPFFSNVTWFHAIHVSGTNGTKRFDNPVLPF
NDGVYFASTEKSNIIRGWIFGTTLDSKTQSLLIVNNATNVVIKVCEFQFCNDPFLGVYYH
KNNKSWMESEFRVYSSANNCTFEYVSQPFLMDLEGKQGNFKNLREFVFKNIDGYFKIYSK
HTPINLVRDLPQGFSALEPLVDLPIGINITRFQTLLALHRSYLTPGDSSSGWTAGAAAYY
VGYLQPRTFLLKYNENGTITDAVDCALDPLSETKCTLKSFTVEKGIYQTSNFRVQPTESI
VRFPNITNLCPFGEVFNATRFASVYAWNRKRISNCVADYSVLYNSASFSTFKCYGVSPTK
LNDLCFTNVYADSFVIRGDEVRQIAPGQTGKIADYNYKLPDDFTGCVIAWNSNNLDSKVG
GNYNYLYRLFRKSNLKPFERDISTEIYQAGSTPCNGVEGFNCYFPLNSTGFQPTNGVGYQ
PYRVVVLSFELLHAPATVCGPKKSTNLVKNKCVNFNFNGLTGTGVLTESNKKFLPFQQFG
RDIADTTDAVRDPQTLEILDITPCSFGGVSVITPGTNTSNQVAVLYQGVNCTEVPVAIHA
DQLTPTWRVYSTGSNVFQTRAGCLIGAEHVNNSYECDIPIGAGICASYQTQTNSPGSASS
VASQSIIAYTMSLGAENSVAYSNNSIAIPTNFTISVTTEILPVSMTKTSVDCTMYICGDS
TECSNLLLQYGSFCTQLNRALTGIAVEQDKNTQEVFAQVKQIYKTPPIKDFGGFNFSQIL
PDPSKPSKRSFIEDLLFNKVTLADAGFIKQYGDCLGDIAARDLICAQKFNGLTVLPPLLT
DEMIAQYTSALLAGTITSGWTFGAGAALQIPFAMQMAYRFNGIGVTQNVLYENQKLIANQ
FNSAIGKIQDSLSSTASALGKLQDVVNQNAQALNTLVKQLSSNFGAISSVLNDILSRLDP
PEAEVQIDRLITGRLQSLQTYVTQQLIRAAEIRASANLAATKMSECVLGQSKRVDFCGKG
YHLMSFPQSAPHGVVFLHVTYVPAQEKNFTTAPAICHDGKAHFPREGVFVSNGTHWFVTQ
RNFYEPQIITTDNTFVSGNCDVVIGIVNNTVYDPLQPELDS
SEQ ID NO: 115-a wild type amino acid sequence of Human Severe Acute
Respiratory Syndrome (SARS) coronavirus (SARS-CoV-1) Spike (S) glycoprotein
having the following features N'-C' (Li F. et al. 2005 Science
309(5742):1864-1868; submitted as UniProtKB Accession No. P59594 entitled
SPIKE CVHSA entry 135 dated 22April2020; see also ″SARS-CoV″ in Wrapp et al.
2020 Science 367(6483):1260-1263 and Supplementary Materials):
Signal peptide residues 1-13 (underlined)
                  10 20 30 40 50 60
MFIFLLFLTL TSGSDLDRCT TFDDVQAPNY TQHTSSMRGV YYPDEIFRSD TLYLTQDLFL
                  70 80 90 100 110 120
PFYSNVTGFH TINHTFGNPV IPFKDGIYFA ATEKSNVVRG WVFGSTMNNK SQSVIIINNS
                  130 140 150 160 170 180
TNVVIRACNF ELCDNPFFAV SKPMGTQTHT MIFDNAFNCT FEYISDAFSL DVSEKSGNFK
                  190 200 210 220 230 240
HLREFVFKNK DGFLYVYKGY QPIDVVRDLP SGFNTLKPIF KLPLGINITN FRAILTAFSP
                  250 260 270 280 290 300
AQDIWGTSAA AYFVGYLKPT TFMLKYDENG TITDAVDCSQ NPLAELKCSV KSFEIDKGIY
                  310 320 330 340 350 360
QTSNFRVVPS GDVVRFPNIT NLCPFGEVFN ATKFPSVYAW ERKKISNCVA DYSVLYNSTF
                  370 380 390 400 410 420
FSTFKCYGVS ATKLNDLCFS NVYADSFVVK GDDVRQIAPG QTGVIADYNY KLPDDFMGCV
                  430 440 450 460 470 480
LAWNTRNIDA TSTGNYNYKY RYLRHGKLRP FERDISNVPF SPDGKPCTPP ALNCYWPLND
                  490 500 510 520 530 540
YGFYTTTGIG YQPYRVVVLS FELLNAPATV CGPKLSTDLI KNQCVNFNFN GLTGTGVLTP
                  550 560 570 580 590 600
SSKRFQPFQQ FGRDVSDFTD SVRDPKTSEI LDISPCSFGG VSVITPGTNA SSEVAVLYQD
                  610 620 630 640 650 660
VNCTDVSTAI HADQLTPAWR IYSTGNNVFQ TQAGCLIGAE HVDTSYECDI PIGAGICASY
                  670 680 690 700 710 720
HTVSLLRSTS QKSIVAYTMS LGADSSIAYS NNTIAIPTNF SISITTEVMP VSMAKTSVDC
                  730 740 750 760 770 780
NMYICGDSTE CANLLLQYGS FCTQLNRALS GIAAEQDRNT REVFAQVKQM YKTPTLKYFG
                  790 800 810 820 830 840
GFNFSQILPD PLKPTKRSFI EDLLFNKVTL ADAGFMKQYG ECLGDINARD LICAQKFNGL
                  850 860 870 880 890 900
TVLPPLLTDD MIAAYTAALV SGTATAGWTF GAGAALQIPF AMQMAYRFNG IGVTQNVLYE
                  910 920 930 940 950 960
NQKQIANQFN KAISQIQESL TTTSTALGKL QDVVNQNAQA LNTLVKQLSS NFGAISSVLN
                  970 980 990 1000 1010 1020
DILSRLDKVE AEVQIDRLIT GRLQSLQTYV TQQLIRAAEI RASANLAATK MSECVLGQSK
                  1030 1040 1050 1060 1070 1080
RVDFCGKGYH LMSFPQAAPH GVVFLHVTYV PSQERNFTTA PAICHEGKAY FPREGVFVFN
                  1090 1100 1110 1120 1130 1140
GTSWFITQRN FFSPQIITTD NTFVSGNCDV VIGIINNTVY DPLQPELDSF KEELDKYFKN
                  1150 1160 1170 1180 1190 1200
HTSPDVDLGD ISGINASVVN IQKEIDRLNE VAKNLNESLI DLQELGKYEQ YIKWPWYVWL
                  1210 1220 1230 1240 1250 1255
GFIAGLIAIV MVTILLCCMT SCCSCLKGAC SCGSCCKFDE DDSEPVLKGV KLHYT
SEQ ID NO: 116-residues 14-1255 of the SARS-CoV-1 Spike (S) protein amino
acid sequence SEQ ID NO: 115
                  10 20 30 40 50 60
SDLDRCTTFD DVQAPNYTQH TSSMRGVYYP DEIFRSDTLY LTQDLFLPFY SNVTGFHTIN
                  70 80 90 100 110 120
HTFGNPVIPF KDGIYFAATE KSNVVRGWVF GSTMNNKSQS VIIINNSTNV VIRACNFELC
                  130 140 150 160 170 180
DNPFFAVSKP MGTQTHTMIF DNAFNCTFEY ISDAFSLDVS EKSGNFKHLR EFVFKNKDGF
                  190 200 210 220 230 240
LYVYKGYQPI DVVRDLPSGF NTLKPIFKLP LGINITNFRA ILTAFSPAQD IWGTSAAAYF
                  250 260 270 280 290 300
VGYLKPTTFM LKYDENGTIT DAVDCSQNPL AELKCSVKSF EIDKGIYQTS NFRVVPSGDV
                  310 320 330 340 350 360
VRFPNITNLC PFGEVFNATK FPSVYAWERK KISNCVADYS VLYNSTFFST FKCYGVSATK
                  370 380 390 400 410 420
LNDLCFSNVY ADSFVVKGDD VRQIAPGQTG VIADYNYKLP DDFMGCVLAW NTRNIDATST
                  430 440 450 460 470 480
GNYNYKYRYL RHGKLRPFER DISNVPFSPD GKPCTPPALN CYWPLNDYGF YTTTGIGYQP
                  490 500 510 520 530 540
YRVVVLSFEL LNAPATVCGP KLSTDLIKNQ CVNFNFNGLT GTGVLTPSSK RFQPFQQFGR
                  550 560 570 580 590 600
DVSDFTDSVR DPKTSEILDI SPCSFGGVSV ITPGTNASSE VAVLYQDVNC TDVSTAIHAD
                  610 620 630 640 650 660
QLTPAWRIYS TGNNVFQTQA GCLIGAEHVD TSYECDIPIG AGICASYHTV SLLRSTSQKS
                  670 680 690 700 710 720
IVAYTMSLGA DSSIAYSNNT IAIPTNFSIS ITTEVMPVSM AKTSVDCNMY ICGDSTECAN
                  730 740 750 760 770 780
LLLQYGSFCT QLNRALSGIA AEQDRNTREV FAQVKQMYKT PTLKYFGGFN FSQILPDPLK
                  790 800 810 820 830 840
PTKRSFIEDL LFNKVTLADA GFMKQYGECL GDINARDLIC AQKFNGLTVL PPLLTDDMIA
                  850 860 870 880 890 900
AYTAALVSGT ATAGWTFGAG AALQIPFAMQ MAYRFNGIGV TQNVLYENQK QIANQFNKAI
                  910 920 930 940 950 960
SQIQESLTTT STALGKLQDV VNQNAQALNT LVKQLSSNFG AISSVLNDIL SRLDKVEAEV
                  970 980 990 1000 1010 1020
QIDRLITGRL QSLQTYVTQQ LIRAAEIRAS ANLAATKMSE CVLGQSKRVD FCGKGYHLMS
                  1030 1040 1050 1060 1070 1080
FPQAAPHGVV FLHVTYVPSQ ERNFTTAPAI CHEGKAYFPR EGVFVFNGTS WFITQRNFFS
                  1090 1100 1110 1120 1130 1140
PQIITTDNTF VSGNCDVVIG IINNTVYDPL QPELDSFKEE LDKYFKNHTS PDVDLGDISG
                  1150 1160 1170 1180 1190 1200
INASVVNIQK EIDRLNEVAK NLNESLIDLQ ELGKYEQYIK WPWYVWLGFI AGLIAIVMVT
                  1210 1220 1230 1240 1242
ILLCCMTSCC SCLKGACSCG SCCKFDEDDS EPVLKGVKLH YT
SEQ ID NO: 117-a wild type amino acid sequence of Middle East Respiratory
Syndrome (MERS) coronavirus (MERS-CoV) Spike (S) glycoprotein having the
following features N'-C' (Millet and Whittaker; submitted as GenBank
Accession No. AFS88936.1 Version 1 dated December 4, 2012 entitled ″S protein
[Human betacoronavirus 2c EMC/2012]″ encoded by GenBank Accession No.
JX869059.2 see also Yang et al. 2014 Virol Immunol 27(10): 543-550 and Yuan
et al. 2017 Nat. Comm. 8(15092), 9 pgs & Suppl. Materials):
Signal peptide residues 1-18 (underlined)
                  10 20 30 40 50 60
MIHSVFLLMF LLTPTESYVD VGPDSVKSAC IEVDIQQTFF DKTWPRPIDV SKADGIIYPQ
                  70 80 90 100 110 120
GRTYSNITIT YQGLFPYQGD HGDMYVYSAG HATGTTPQKL FVANYSQDVK QFANGFVVRI
                  130 140 150 160 170 180
GAAANSTGTV IISPSTSATI RKIYPAFMLG SSVGNFSDGK MGRFFNHTLV LLPDGCGTLL
                  190 200 210 220 230 240
RAFYCILEPR SGNHCPAGNS YTSFATYHTP ATDCSDGNYN RNASLNSFKE YFNLRNCTFM
                  250 260 270 280 290 300
YTYNITEDEI LEWFGITQTA QGVHLFSSRY VDLYGGNMFQ FATLPVYDTI KYYSIIPHSI
                  310 320 330 340 350 360
RSIQSDRKAW AAFYVYKLQP LTFLLDFSVD GYIRRAIDCG FNDLSQLHCS YESFDVESGV
                  370 380 390 400 410 420
YSVSSFEAKP SGSWEQAEG VECDFSPLLS GTPPQVYNFK RLVFTNCNYN LTKLLSLFSV
                  430 440 450 460 470 480
NDFTCSQISP AAIASNCYSS LILDYFSYPL SMKSDLSVSS AGPISQFNYK QSFSNPTCLI
                  490 500 510 520 530 540
LATVPHNLTT ITKPLKYSYI NKCSRLLSDD RTEVPQLVNA NQYSPCVSIV PSTVWEDGDY
                  550 560 570 580 590 600
YRKQLSPLEG GGWLVASGST VAMTEQLQMG FGITVQYGTD TNSVCPKLEF ANDTKIASQL
                  610 620 630 640 650 660
GNCVEYSLYG VSGRGVFQNC TAVGVRQQRF VYDAYQNLVG YYSDDGNYYC LRACVSVPVS
                  670 680 690 700 710 720
VIYDKETKTH ATLFGSVACE HISSTMSQYS RSTRSMLKRR DSTYGPLQTP VGCVLGLVNS
                  730 740 750 760 770 780
SLFVEDCKLP LGQSLCALPD TPSTLTPRSV RSVPGEMRLA SIAFNHPIQV DQLNSSYFKL
                  790 800 810 820 830 840
SIPTNFSFGV TQEYIQTTIQ KVTVDCKQYV CNGFQKCEQL LREYGQFCSK INQALHGANL
                  850 860 870 880 890 900
RQDDSVRNLF ASVKSSQSSP IIPGFGGDFN LTLLEPVSIS TGSRSARSAI EDLLFDKVTI
                  910 920 930 940 950 960
ADPGYMQGYD DCMQQGPASA RDLICAQYVA GYKVLPPLMD VNMEAAYTSS LLGSIAGVGW
                  970 980 990 1000 1010 1020
TAGLSSFAAI PFAQSIFYRL NGVGITOOVL SENQKLIANK FNQALGAMQT GFTTTNEAFQ
                  1030 1040 1050 1060 1070 1080
KVQDAVNNNA QALSKLASEL SNTFGAISAS IGDIIQRLDV LEQDAQIDRL INGRLTTLNA
                  1090 1100 1110 1120 1130 1140
FVAQQLVRSE SAALSAQLAK DKVNECVKAQ SKRSGFCGQG THIVSFVVNA PNGLYFMHVG
                  1150 1160 1170 1180 1190 1200
YYPSNHIEVV SAYGLCDAAN PTNCIAPVNG YFIKTNNTRI VDEWSYTGSS FYAPEPITSL
                  1210 1220 1230 1240 1250 1260
NTKYVAPQVT YQNISTNLPP PLLGNSTGID FQDELDEFFK NVSTSIPNFG SLTQINTTLL
                  1270 1280 1290 1300 1310 1320
DLTYEMLSLQ QVVKALNESY IDLKELGNYT YYNKWPWYIW LGFIAGLVAL ALCVFFILCC
                  1330 1340 1350 1353
TGCGTNCMGK LKCNRCCDRY EEYDLEPHKV HVH
SEQ ID NO: 118-residues 19-1353 of the MERS-CoV-1 Spike (S) protein amino
acid sequence SEQ ID NO: 117
                  10 20 30 40 50 60
VDVGPDSVKS ACIEVDIQQT FFDKTWPRPI DVSKADGIIY PQGRTYSNIT ITYQGLFPYQ
                  70 80 90 100 110 120
GDHGDMYVYS AGHATGTTPQ KLFVANYSQD VKQFANGFVV RIGAAANSTG TVIISPSTSA
                  130 140 150 160 170 180
TIRKIYPAFM LGSSVGNFSD GKMGRFFNHT LVLLPDGCGT LLRAFYCILE PRSGNHCPAG
                  190 200 210 220 230 240
NSYTSFATYH TPATDCSDGN YNRNASLNSF KEYFNLRNCT FMYTYNITED EILEWFGITQ
                  250 260 270 280 290 300
TAQGVHLFSS RYVDLYGGNM FQFATLPVYD TIKYYSIIPH SIRSIQSDRK AWAAFYVYKL
                  310 320 330 340 350 360
QPLTFLLDFS VDGYIRRAID CGFNDLSQLH CSYESFDVES GVYSVSSFEA KPSGSVVEQA
                  370 380 390 400 410 420
EGVECDFSPL LSGTPPQVYN FKRLVFTNCN YNLTKLLSLF SVNDFTCSQI SPAAIASNCY
                  430 440 450 460 470 480
SSLILDYFSY PLSMKSDLSV SSAGPISQFN YKQSFSNPTC LILATVPHNL TTITKPLKYS
                  490 500 510 520 530 540
YINKCSRLLS DDRTEVPQLV NANQYSPCVS IVPSTVWEDG DYYRKQLSPL EGGGWLVASG
                  550 560 570 580 590 600
STVAMTEQLQ MGFGITVQYG TDTNSVCPKL EFANDTKIAS QLGNCVEYSL YGVSGRGVFQ
                  610 620 630 640 650 660
NCTAVGVRQQ RFVYDAYQNL VGYYSDDGNY YCLRACVSVP VSVIYDKETK THATLFGSVA
                  670 680 690 700 710 720
CEHISSTMSQ YSRSTRSMLK RRDSTYGPLQ TPVGCVLGLV NSSLFVEDCK LPLGQSLCAL
                  730 740 750 760 770 780
PDTPSTLTPR SVRSVPGEMR LASIAFNHPI QVDQLNSSYF KLSIPTNFSF GVTQEYIQTT
                  790 800 810 820 830 840
IQKVTVDCKQ YVCNGFQKCE QLLREYGQFC SKINQALHGA NLRQDDSVRN LFASVKSSQS
                  850 860 870 880 890 900
SPIIPGFGGD FNLTLLEPVS ISTGSRSARS AIEDLLFDKV TIADPGYMQG YDDCMQQGPA
                  910 920 930 940 950 960
SARDLICAQY VAGYKVLPPL MDVNMEAAYT SSLLGSIAGV GWTAGLSSFA AIPFAQSIFY
                  970 980 990 1000 1010 1020
RLNGVGITQQ VLSENQKLIA NKFNQALGAM QTGFTTTNEA FQKVQDAVNN NAQALSKLAS
                  1030 1040 1050 1060 1070 1080
ELSNTFGAIS ASIGDIIQRL DVLEQDAQID RLINGRLTTL NAFVAQQLVR SESAALSAQL
                  1090 1100 1110 1120 1130 1140
AKDKVNECVK AQSKRSGFCG QGTHIVSFVV NAPNGLYFMH VGYYPSNHIE VVSAYGLCDA
                  1150 1160 1170 1180 1190 1200
ANPTNCIAPV NGYFIKTNNT RIVDEWSYTG SSFYAPEPIT SLNTKYVAPQ VTYQNISTNL
                  1210 1220 1230 1240 1250 1260
PPPLLGNSTG IDFQDELDEF FKNVSTSIPN FGSLTQINTT LLDLTYEMLS LQQVVKALNE
                  1270 1280 1290 1300 1310 1320
SYIDLKELGN YTYYNKWPWY IWLGFIAGLV ALALCVFFIL CCTGCGTNCM GKLKCNRCCD
              1330 1335
RYEEYDLEPH KVHVH
SEQ ID NO: 119-SAM VEE TC-83 replicon 1-7561 60
```

| | |
|---|---|
| auaggcggcg caugagagaa gcccagacca auuaccuacc caaaauggag aaaguucacg | 60 |
| uugacaucga ggaagacagc ccauuccuca gagcuuugca gcggagcuuc ccgcaguuug | 120 |
| agguagaagc caagcagguc acugauaaug accaugcuaa ugccagagcg uuuucgcauc | 180 |
| uggcuucaaa acugaucgaa acggaggugg acccauccga cacgauccuu gacauuggaa | 240 |
| gugcgcccgc ccgcagaaug uauucuaagc acaaguauca uuguaucugu ccgaugagau | 300 |
| gugeggaaga uccggacaga uuguauaagu augcaacuaa gcugaagaaa aacuguaagg | 360 |
| aaauaacuga uaaggaauug gacaagaaaa ugaaggagcu cgccgccguc augagcgacc | 420 |
| cugaccugga aacugagacu augugccucc acgacgacga gucgugucgc uacgaagggc | 480 |
| aagucgcugu uuaccaggau guauacgcgg uugacggacc gacaagucuc uaucaccaag | 540 |
| ccaauaaggg aguuagaguc gccuacugga uaggcuuuga caccaccccu uuuauguuua | 600 |
| agaacuuggc uggagcauau ccaucauacu cuaccaacug ggccgacgaa accguguuaa | 660 |
| cggcucguaa cauaggccua ugcagcucug acguuaugga gcggucacgu agagggaugu | 720 |
| ccauucuuag aaagaaguau uugaaaccau ccaacaaugu ucuauucucu guuggcucga | 780 |
| ccaucuacca cgagaagagg gacuuacuga ggagcuggca ccugccgucu guauuucacu | 840 |
| uacguggcaa gcaaaauuac acaugucggu gugagacuau aguuaguugc gacggguacg | 900 |
| ucguuaaaag aauagcuauc aguccaggcc uguaugggaa gccuucaggc uaugcugcua | 960 |
| cgaugcaccg cgagggauuc uugugcugca aagugacaga cacauugaac ggggagaggg | 1020 |
| ucucuuuucc cgugugcacg uaugugccag cuacauugug ugaccaaaug acuggcauac | 1080 |
| uggcaacaga ugucagugcg gacgacgcgc aaaaacugcu gguugggcuc aaccagcgua | 1140 |
| uagucgucaa cggucgcacc cagagaaaca ccaauaccau gaaaaauuac cuuuugcccg | 1200 |
| uaguggccca ggcauuugcu aggugggcaa aggaauauaa ggaagaucaa gaagaugaaa | 1260 |
| ggccacuagg acuacgagau agacaguuag ucauggggug uuguugggcu uuuagaaggc | 1320 |
| acaagauaac aucuauuuau aagcgcccgg auacccaaac caucaucaaa gugaacagcg | 1380 |
| auuuccacuc auucgugcug cccaggauag gcaguaacac auuggagauc gggcugagaa | 1440 |
| caagaaucag gaaaauguua gaggagcaca aggagccguc accucucauu accgccgagg | 1500 |
| acguacaaga agcuaagugc gcagccgaug aggcuaagga ggugcgugaa gccgaggagu | 1560 |
| ugcgcgcagc ucuaccaccu uuggcagcug auguugagga gcccacucug gaagccgaug | 1620 |
| ucgacuugau guuacaagag gcuggggccg gcucagugga gacaccucgu ggcuugauaa | 1680 |
| agguuaccag cuacgauggc gaggacaaga ucggcucuua cgcugugcuu ucuccgcagg | 1740 |
| cuguacucaa gagugaaaaa uuaucuugca uccacccucu cgcugaacaa gucauaguga | 1800 |
| uaacacacuc uggccgaaaa gggcguuaug ccguggaacc auaccauggu aaaguagugg | 1860 |
| ugccagaggg acaugcaaua cccguccagg acuuucaagc ucugagugaa agugccacca | 1920 |
| uuguguacaa cgaacgugag uucguaaaca gguaccugca ccauauugcc acacauggag | 1980 |
| gagcgcugaa cacugaugaa gaauauuaca aaacugucaa gcccagcgag cacgacggcg | 2040 |
| aauaccugua cgacaucgac aggaaacagu gcgucaagaa agaacuaguc acugggcuag | 2100 |
| ggcucacagg cgagcuggug gauccucccu uccaugaauu cgccuacgag agucugagaa | 2160 |
| cacgaccagc cgcuccuuac caaguaccaa ccauaggggu guauggcgug ccaggaucag | 2220 |
| gcaagucugg caucauuaaa agcgcaguca ccaaaaaaga ucuaguggug agcgccaaga | 2280 |
| aagaaaacug ugcagaaauu auaagggacg ucaagaaaau gaaagggcug gacgucaaug | 2340 |
| ccagaacugu ggacucagug cucuugaaug gaugcaaaca ccccguagag acccuguaua | 2400 |
| uugacgaagc uuuugcuugu caugcaggua cucucagagc gcucauagcc auuauaagac | 2460 |
| cuaaaaaggc agugcucugc ggggauccca aacagugcgg uuuuuuuaac augaugugcc | 2520 |
| ugaaagugca uuuuaaccac gagauuugca cacaagucuu ccacaaaagc aucucucgcc | 2580 |
| guugcacuaa aucugugacu ucggucgucu caaccuuguu uuacgacaaa aaaaugagaa | 2640 |
| cgacgaaucc gaaagagacu aagauuguga uugacacuac cggcaguacc aaaccuaagc | 2700 |
| aggacgaucu cauucucacu uguuucagag ggugggugaa gcaguugcaa auagauuaca | 2760 |
| aaggcaacga aauaaugacg gcagcugccu cucaagggcu gacccguaaa gguguguaug | 2820 |
| ccguucggua caaggugaau gaaaauccuc uguacgcacc caccucagaa caugugaacg | 2880 |
| uccuacugac ccgcacggag gaccgcaucg uguggaaaac acuagccggc gacccaugga | 2940 |
| uaaaaacacu gacugccaag uacccuggga auuucacugc cacgauagag gaguggcaag | 3000 |
| cagagcauga ugccaucaug aggcacaucu uggagagacc ggacccuacc gacgucuucc | 3060 |
| agaauaaggc aaacgugugu ugggccaagg cuuuagugcc ggugcugaag accgcuggca | 3120 |
| uagacaugac cacugaacaa uggaacacug uggauuauuu ugaaacggac aaagcucacu | 3180 |
| cagcagagau aguauugaac caacuaugcg ugagguucuu uggacucgau cuggacuccg | 3240 |
| gucuauuuuc ugcacccacu guuccguuau ccauuaggaa uaaucacugg gauaacuccc | 3300 |
| cgucgccuaa cauguacggg cugaauaaag aagugguccg ucagcucucu cgcagguacc | 3360 |
| cacaacugcc ucgggcaguu gccacuggaa gagucuauga caugaacacu gguacacugc | 3420 |
| gcaauuauga uccgcgcaua aaccuaguac cuguaaacag aagacugccu caugcuuuag | 3480 |
| uccuccacca uaaugaacac ccacagagug acuuuucuuc auucgucagc aaauugaagg | 3540 |
| gcagaacugu ccuggugguc ggggaaaagu uguccguccc aggcaaaaug guugacuggu | 3600 |
| ugucagaccg gccugaggcu accuucagag cucggcugga uuuaggcauc ccaggugaug | 3660 |
| ugcccaaaua ugacauaaua uuuguuaaug ugaggacccc auauaaauac caucacuauc | 3720 |
| agcaguguga agaccaugcc auuaagcuua gcauguugac caagaaagcu ugucugcauc | 3780 |
| ugaaucccgg cggaaccugu gucagcauag guuaugguua cgcugacagg gccagcgaaa | 3840 |
| gcaucauugg ugcuauagcg cggcaguuca aguuuucccg gguaugcaaa ccgaaauccu | 3900 |
| cacuugaaga gaeggaaguu cuguuuguau ucauugggua cgaucgcaag gcccguacgc | 3960 |
| acaauccuua caagcuuuca ucaaccuuga ccaacauuua uacagguucc agacuccacg | 4020 |
| aagccggaug ugcacccuca uaucaugugg ugcgagggga uauugccacg gccaccgaag | 4080 |
| gagugauuau aaaugcugcu aacagcaaag gacaaccugg cggaggggug ugcggagcgc | 4140 |
| uguauaagaa auucccggaa agcuucgauu uacagccgau cgaaguagga aaagcgcgac | 4200 |
| uggucaaagg ugcagcuaaa cauaucauuc augccguagg accaaacuuc aacaaaguuu | 4260 |
| cggagguuga aggugacaaa caguuggcag aggcuuauga guccaucgcu aagauuguca | 4320 |
| acgauaacaa uuacaaguca guagcgauuc cacuguuguc caccggcauc uuuuccggga | 4380 |
| acaaagaucg acuaacccaa ucauugaacc auuugcugac agcuuuagac accacugaug | 4440 |
| cagauguagc cauauacugc agggacaaga aaugggaaau gacucucaag gaagcagugg | 4500 |
| cuaggagaga agcaguggag gagauaugca uauccgacga cucuucagug acagaaccug | 4560 |
| augcagagcu ggugagggug cauccgaaga guucuuuggc uggaaggaag ggcuacagca | 4620 |
| caagcgaugg caaaacuuuc ucauauuugg aagggaccaa guuucaccag gcggccagg | 4680 |
| auauagcaga aauuaaugcc auguggcccg uugcaacgga ggccaaugag cagguaugca | 4740 |
| uguauauccu cggagaaagc augagcagua uuaggucgaa augccccguc gaagagucgg | 4800 |
| aagccuccac accaccuagc acgcugccuu gcuugugcau ccaugccaug acuccagaaa | 4860 |
| gaguacagcg ccuaaaagcc ucacguccag aacaaauuac ugugugcuca uccuuuccau | 4920 |
| ugccgaagua uagaaucacu ggugugcaga agauccaaug cucccagccu auauuguucu | 4980 |
| caccgaaagu gccugcguau auucauccaa ggaaguaucu cguggaaaca ccaccgguag | 5040 |
| acgagacucc ggagccaucg gcagagaacc aauccacaga ggggacaccu gaacaaccac | 5100 |
| cacuuauaac cgaggaugag accaggacua gaacgccuga gccgaucauc aucgaagagg | 5160 |
| aagaagagga uagcauaagu uugcugucag auggcccgac ccaccaggug cugcaagucg | 5220 |
| aggcagacau ucacgggccg cccucuguau cuagcucauc cugguccauu ccucaugcau | 5280 |
| ccgacuuuga uguggacagu uuauccauac uugacacccu ggagggagcu agcgugacca | 5340 |
| gcggggcaac gucagccgag acuaacucuu acuucgcaaa gaguauggag uuucuggcgc | 5400 |
| gaccggugcc ugcgccucga acaguauuca ggaacccucc acaucccgcu ccgcgcacaa | 5460 |
| gaacaccguc acuugcaccc agcagggccu gcucgagaac cagccuaguu uccaccccgc | 5520 |
| caggcgugaa uagggugauc acuagagagg agcucgaggc gcuuaccccg ucacgcacuc | 5580 |
| cuagcagguc ggucucgaga accagccugg ucuccaaccc gccaggcgua aauaggguga | 5640 |
| uuacaagaga ggaguuugag gcguucguag cacaacaaca augacgguuu gaugcgggug | 5700 |
| cauacaucuu uuccuccgac accggucaag ggcauuuaca acaaaaauca guaaggcaaa | 5760 |
| cggugcuauc cgaaguggug uuggagagga ccgaauugga gauuucguau gccccgcgcc | 5820 |
| ucgaccaaga aaaagaagaa uuacuacgca agaaauuaca guuaaauccc acaccugcua | 5880 |
| acagaagcag auaccagucc aggaaggugg agaacaugaa agccauaaca gcuagacgua | 5940 |
| uucugcaagg ccuagggcau uauuugaagg cagaaggaaa aguggagugc uaccgaaccc | 6000 |
| ugcauccugu uccuuuguau ucaucuagug ugaaccgugc cuuuucaagc cccaaggucg | 6060 |
| caguggaagc cuguaacgcc auguugaaag agaacuuucc gacuguggcu ucuuacugua | 6120 |
| uuauuccaga guacgaugcc uauuuggaca ugguugaegg agcuucaugc ugcuuagaca | 6180 |
| cugccaguuu uugcccugca aagcugcgca gcuuuccaaa gaaacacucc uauuuggaac | 6240 |
| ccacaauacg aucggcagug ccuucagcga uccagaacac gcuccagaac guccuggcag | 6300 |
| cugccacaaa aagaaauugc aaugucacgc aaaugagaga auugcccgua uuggauucgg | 6360 |
| cggccuuuaa uguggaaugc uucaagaaau augcguguaa uaaugaauau ugggaaacgu | 6420 |
| uuaaagaaaa ccccaucagg cuuacugaag aaaacguggu aaauuacauu accaaauuaa | 6480 |
| aaggaccaaa agcugcugcu cuuuuugcga agacacauaa uuugaauaug uugcaggaca | 6540 |
| uaccaaugga cagguuugua auggacuuaa agagagacgu gaaagugacu ccaggaacaa | 6600 |
| aacauacuga agaacggccc aagguacagg ugauccaggc ugccgauccg cuagcaacag | 6660 |
| cguaucugug cggaauccac cgagagcugg uuaggagauu aaaugcgguc cugcuuccga | 6720 |
| acauucauac acuguuugau augucggcug aagacuuuga cgcuauuaua gccgagcacu | 6780 |
| uccagccugg ggauuguguu cuggaaacug acaucgcguc guuugauaaa agugaggacg | 6840 |
| acgccauggc ucugaccgcg uuaaugauuc uggaagacuu agguguggac gcagagcugu | 6900 |
| ugacgcugau ugaggcggcu uucggcgaaa uuucaucaau acauuugccc acuaaaacua | 6960 |
| aauuuaaauu cggagccaug augaaaucug gaauguuccu cacacuguuu gugaacacag | 7020 |
| ucauuaacau uguaaucgca agcagagugu ugagagaacg gcuaaccgga ucaccaugug | 7080 |
| cagcauucau uggagaugac aauaucguga aaggagucaa aucggacaaa uuaauggcag | 7140 |
| acaggugcgc caccugguug aauauggaag ucaagauuau agaugcugug gugggcgaga | 7200 |
| aagcgccuua uuucugugga ggguuuauuu ugugugacuc cgugaccggc acagcgugcc | 7260 |
| guguggcaga cccccuaaaa aggcuguuua agcuuggcaa accucuggca gcagacgaug | 7320 |
| aacaugauga ugacaggaga agggcauugc augaagaguc aacacgcugg aaccgagugg | 7380 |
| guauucuuuc agagcugugc aaggcaguag aaucaaggua ugaaaccgua ggaacuucca | 7440 |
| ucauaguuau ggccaugacu acucuagcua gcaguguuaa aucauucagc uaccugagag | 7500 |
| gggccccuau aacucucuac ggcuaaccug aauggacuac gacauagucu aguccgccaa | 7560 |
| g | 7561 |

SEQ ID NO: 120-SAM VEE TC-83 replicon 7562-7747

| | |
|---|---|
| ucuagacggc gcgcccaccc agcggccgca uacagcagca auuggcaagc ugcuuacaua | 60 |
| gaacucgcgg cgauuggcau gccgccuuaa aauuuuuauu uuauuuuucu UUUCUUUUCC | 120 |
| gaaucggauu uuguuuuuaa uauuucaaaa aaaaaaaaaa aaaaaaaaaa aaaaaaaaaa | 180 |
| aaaaaa | 186 |

SEQ ID NO: 121-a Glycine/Serine/Alanine linker
10
GGGGSGGGGS
SEQ ID NO: 122-a PADRE linker
10 13
AKFVAAWTLK AAA
SEQ ID NO: 123-a D linker
10 15
QSIALSSLMV AQAIP
SEQ ID NO: 124-a TpD linker
10 20 30 32
ILMQYIKANS KFIGIPMGLP QSIALSSLMV AQ
SEQ ID NO: 125-B.1.351_PROSS_0_5
QCVNFTTRTQLPPAYTNSFTRGVYYPDKVFRSSVLHSTQDLFLPFFSNVTWFHAIHVSGT
NGTKRFDNPVLPFNDGVYFASTEKSNIIRGWIFGTTLDSKTQSLLIVNNATNVVIKVCEF
QFCNDPFLGVYYHKNNKSWMESEFRVYSSANNCTFEYVSQPFLMDLEGKQGNFKNLREFV
FKNIDGYFKIYSKHTPINLVRGLPQGFSALEPLVDLPIGINITRFQTLLALHISYLTPGD
SSSGWTAGAAAYYVGYLQPRTFLLKYNENGTITDAVDCALDPLSETKCTLKSFTVEKGIY
QTSNFRVQPTESIVRFPNITNLCPFGEVFNATRFASVYAWNRKRISNCVADYSVLYNSAS
FSTFKCYGVSPTKLNDLCFTNVYADSFVIRGDEVRQIAPGQTGNIADYNYKLPDDFTGCV
IAWNSNNLDSKVGGNYNYLYRLFRKSNLKPFERDISTEIYQAGSTPCNGVKGFNCYFPLQ
SYGFQPTYGVGYQPYRVVVLSFELLHAPATVCGPKKSTNLVKNKCVNFNFNGLTGTGVLT
ESNKKFLPFQQFGRDIADTTDAVRDPQTLEILDITPCSFGGVSVITPGTNTSNQVAVLYQ
GVNCTEVPVAIHADQLTPTWRVYSTGSNVFQTRAGCLIGAEHVNNSYECDIPIGAGICAS
YQTQTNSPGSASSVANQSIIAYTMSLGVENPIPYSNNVIAIPTNFTISVTTEVIPVSMTK
TSVDCAQYICGDNEECEQLLLQYGSFCDQLNRALHEIAVKQDEALLEVFAQVKQIYKTPE
IKDFGGFNFSQILPDPSKSSYRSAIEDLLFNKVKLSDPGFIKQYQDCLGDNSARDLICAQ
FFNGLTVLPPLLTDEMIAAYTSALLAGTITAGWTFGAGSALAIPFALQMAYRFNGIGVTQ
NVLYENQKLIANQFNKAITKIQESLTTTSQALAKLQDVVNQNAQALNTLVKQLSNKFGAI
SSVLNDILSRLDPPEAKVQIDRLITGRLQALQTYVTQQLIRAAEIKASAQLAATKMSECV
LGQSTRVNFCGKGYHLMSFPQSAPHGVVFLHVTYVPSQFKNFTTAPAICHDGRAYFPREG
VFVSNGTEWFVTQRNFYEPQPITTDNTFVSGNCDVVIGIVNNTVYDPLQPDLDS
SEQ ID NO: 126-B.1.351_PROSS_1_5
QCVNFTTRTQLPPAYTNSFTRGVYYPDKVFRSSVLHSTQDLFLPFFSNVTWFHAIHVSGT
NGTKRFDNPVLPFNDGVYFASTEKSNIIRGWIFGTTLDSKTQSLLIVNNATNVVIKVCEF
QFCNDPFLGVYYHKNNKSWMESEFRVYSSANNCTFEYVSQPFLMDLEGKQGNFKNLREFV
FKNIDGYFKIYSKHTPINLVRGLPQGFSALEPLVDLPIGINITRFQTLLALHISYLTPGD
SSSGWTAGAAAYYVGYLQPRTFLLKYNENGTITDAVDCALDPLSETKCTLKSFTVEKGIY
QTSNFRVQPTESIVRFPNITNLCPFGEVFNATRFASVYAWNRKRISNCVADYSVLYNSAS
FSTFKCYGVSPTKLNDLCFTNVYADSFVIRGDEVRQIAPGQTGNIADYNYKLPDDFTGCV
IAWNSNNLDSKVGGNYNYLYRLFRKSNLKPFERDISTEIYQAGSTPCNGVKGFNCYFPLQ
SYGFQPTYGVGYQPYRVVVLSFELLHAPATVCGPKKSTNLVKNKCVNFNFNGLTGTGVLT
ESNKKFLPFQQFGRDIADTTDAVRDPQTLEILDITPCSFGGVSVITPGTNTSNQVAVLYQ
GVNCTEVPVAIHADQLTPTWRVYSTGSNVFQTRAGCLIGAEHVNNSYECDIPIGAGICAS
YQTQTNSPGSASSVANQSIIAYTMSLGVENPIPYSNNVIAIPTNFTISVTTEIIPVSMTK
TSVDCAQYICGDNSECENLLLQYGSFCDQLNRALHEIAVKQDEALLEVFAQVKQIYKTPP
IKDFGGFNFSQILPDPSKPSYRSAIEDLLFNKVKLSDPGFIKQYEDCLGDNSARDLICAQ
FFNGLTVLPPLLTDEMIAAYTSALLAGTITAGWTFGAGSALAIPFALQMAYRFNGIGVTQ
NVLYENQKLIANQFNKAITKIQESLTSTNQALAKLQDVVNQNAQALNTLVKQLSNNFGAI
SSVLNDILSRLDPPEAKVQIDRLITGRLQALQTYVTQQLIRAAEIKASAELAATKMSECV
LGQSKRVNFCGKGYHLMSFPQSAPHGVVFLHVTYVPSQYKNFTTAPAICHDGRAHFPREG
VFVSNGTDWYVTQRNFYEPQPITTDNTFVSGNCDVVIGIVNNTVYDPLQPDLDS
SEQ ID NO: 127-B.1.351_PROSS_3_5
QCVNFTTRTQLPPAYTNSFTRGVYYPDKVFRSSVLHSTQDLFLPFFSNVTWFHAIHVSGT
NGTKRFDNPVLPFNDGVYFASTEKSNIIRGWIFGTTLDSKTQSLLIVNNATNVVIKVCEF
QFCNDPFLGVYYHKNNKSWMESEFRVYSSANNCTFEYVSQPFLMDLEGKQGNFKNLREFV
FKNIDGYFKIYSKHTPINLVRGLPQGFSALEPLVDLPIGINITRFQTLLALHISYLTPGD
SSSGWTAGAAAYYVGYLQPRTFLLKYNENGTITDAVDCALDPLSETKCTLKSFTVEKGIY
QTSNFRVQPTESIVRFPNITNLCPFGEVFNATRFASVYAWNRKRISNCVADYSVLYNSAS
FSTFKCYGVSPTKLNDLCFTNVYADSFVIRGDEVRQIAPGQTGNIADYNYKLPDDFTGCV
IAWNSNNLDSKVGGNYNYLYRLFRKSNLKPFERDISTEIYQAGSTPCNGVKGFNCYFPLQ
SYGFQPTYGVGYQPYRVVVLSFELLHAPATVCGPKKSTNLVKNKCVNFNFNGLTGTGVLT
ESNKKFLPFQQFGRDIADTTDAVRDPQTLEILDITPCSFGGVSVITPGTNTSNQVAVLYQ
GVNCTEVPVAIHADQLTPTWRVYSTGSNVFQTRAGCLIGAEHVNNSYECDIPIGAGICAS
YQTQTNSPGSASSVASQSIIAYTMSLGVENPIPYSNNVIAIPTNFTISVTTEIIPVSMTK
TSVDCAQYICGDSTECENLLLQYGSFCDQLNRALHEIAVKQDENTQEVFAQVKQIYKTPP
IKDFGGFNFSQILPDPSKPSYRSVIEDLLFNKVTLSDPGFIKQYQDCLGDPSARDLICAQ
KFNGLTVLPPLLTDEMIAAYTSALLAGTITAGWTFGAGSALAIPFAMQMAYRFNGIGVTQ
NVLYENQKLIANQFNKAIGKIQDSLSSTSSALAKLQDVVNQNAQALNTLVKQLSNNFGAI
SSVLNDILSRLDPPEAKVQIDRLITGRLQALQTYVTQQLIRAAEIKASAELAATKMSECV
LGQSKRVNFCGKGYHLMSFPQSAPHGVVFLHVTYVPAQYKNFTTAPAICHDGRAHFPREG
VFVSNGTHWFVTQRNFYEPQPITTDNTFVSGNCDVVIGIVNNTVYDPLQPELDS
SEQ ID NO: 128-B.1.351_PROSS_4_0
QCVNFTTRTQLPPAYTNSFTRGVYYPDKVFRSSVLHSTQDLFLPFFSNVTWFHAIHVSGT
NGTKRFDNPVLPFNDGVYFASTEKSNIIRGWIFGTTLDSKTQSLLIVNNATNVVIKVCEF
QFCNDPFLGVYYHKNNKSWMESEFRVYSSANNCTFEYVSQPFLMDLEGKQGNFKNLREFV
FKNIDGYFKIYSKHTPINLVRGLPQGFSALEPLVDLPIGINITRFQTLLALHISYLTPGD
SSSGWTAGAAAYYVGYLQPRTFLLKYNENGTITDAVDCALDPLSETKCTLKSFTVEKGIY
QTSNFRVQPTESIVRFPNITNLCPFGEVFNATRFASVYAWNRKRISNCVADYSVLYNSAS
FSTFKCYGVSPTKLNDLCFTNVYADSFVIRGDEVRQIAPGQTGNIADYNYKLPDDFTGCV
IAWNSNNLDSKVGGNYNYLYRLFRKSNLKPFERDISTEIYQAGSTPCNGVKGFNCYFPLQ
SYGFQPTYGVGYQPYRVVVLSFELLHAPATVCGPKKSTNLVKNKCVNFNFNGLTGTGVLT
ESNKKFLPFQQFGRDIADTTDAVRDPQTLEILDITPCSFGGVSVITPGTNTSNQVAVLYQ
GVNCTEVPVAIHADQLTPTWRVYSTGSNVFQTRAGCLIGAEHVNNSYECDIPIGAGICAS
YQTQTNSPGSASSVAQQSIIAYTMSLGVENPIPYSNNVIAIPTNFTISVTTEIIPVSMTK
TSVDCAQYICGDSTECENLLLQYGSFCTQLNRALHEIAVEQDKNTQEVFAQVKQIYKTPP
IKDFGGFNFSQILPDPSKPSYRSVIEDLLFNKVTLSDPGFIKQYQDCLGDPAARDLICAQ
KFNGLTVLPPLLTDEMIAAYTSALLAGTITAGWTFGAGSALAIPFAMQMAYRFNGIGVTQ
NVLYENQKLIANQFNKAIGKIQDSLSSTSSALAKLQDVVNQNAQALNTLVKQLSNNFGAI
SSVLNDILSRLDPPEAKVQIDRLITGRLQALQTYVTQQLIRAAEIKASAELAATKMSECV
LGQSKRVNFCGKGYHLMSFPQSAPHGVVFLHVTYVPAQYKNFTTAPAICHDGRAHFPREG
VFVSNGTHWFVTQRNFYEPQPITTDNTFVSGNCDVVIGIVNNTVYDPLQPELDS
SEQ ID NO: 129-B.1.351_PROSS_5_5
QCVNFTTRTQLPPAYTNSFTRGVYYPDKVFRSSVLHSTQDLFLPFFSNVTWFHAIHVSGT
NGTKRFDNPVLPFNDGVYFASTEKSNIIRGWIFGTTLDSKTQSLLIVNNATNVVIKVCEF
QFCNDPFLGVYYHKNNKSWMESEFRVYSSANNCTFEYVSQPFLMDLEGKQGNFKNLREFV
FKNIDGYFKIYSKHTPINLVRGLPQGFSALEPLVDLPIGINITRFQTLLALHISYLTPGD
SSSGWTAGAAAYYVGYLQPRTFLLKYNENGTITDAVDCALDPLSETKCTLKSFTVEKGIY
QTSNFRVQPTESIVRFPNITNLCPFGEVFNATRFASVYAWNRKRISNCVADYSVLYNSAS
FSTFKCYGVSPTKLNDLCFTNVYADSFVIRGDEVRQIAPGQTGNIADYNYKLPDDFTGCV
IAWNSNNLDSKVGGNYNYLYRLFRKSNLKPFERDISTEPYQAGSTPCNGVKGFNCYFPLQ
SYGFQPTYGVGYQPYRVVVLSFELLHAPATVCGPKKSTNLVKNKCVNFNFNGLTGTGVLT
ESNKKFLPFQQFGRDIADTTDAVRDPQTLEILDITPCSFGGVSVITPGTNTSNQVAVLYQ
GVNCTEVPVAIHADQLTPTWRVYSTGSNVFQTRAGCLIGAEHVNNSYECDIPIGAGICAS
YQTQTNSPGSASSVASQSIIAYTMSLGVENPIPYSNNVIAIPTNFTISVTTEIIPVSMTK
TSVDCAQYICGDSTECENLLLQYGSFCTQLNRALTEIAVEQDKNTQEVFAQVKQIYKTPP
IKDFGGFNFSQILPDPSKPSYRSFIEDLLFNKVTLADPGFIKQYQDCLGDPAARDLICAQ
KFNGLTVLPPLLTDEMIAAYTSALLAGTITSGWTFGAGSALAIPFAMQMAYRFNGIGVTQ
NVLYENQKLIANQFNKAIGKIQDSLSSTSSALGKLQDVVNQNAQALNTLVKQLSSNFGAI
SSVLNDILSRLDPPEAEVQIDRLITGRLQALQTYVTQQLIRAAEIKASANLAATKMSECV
LGQSKRVDFCGKGYHLMSFPQSAPHGVVFLHVTYVPAQYKNFTTAPAICHDGKAHFPREG
VFVSNGTHWFVTORNFYEPQPITTDNTFVSGNCDVVIGIVNNTVYDPLQPELDS
SEQ ID NO: 130-B.1.351_Buried_PROSS_1_0
QCVNFTTRTQLPPAYTNSFTRGVYYPDKVFRSSVLHSTQDLFLPFFSNVTWFHAIHVSGT
NGTKRFDNPVLPFNDGVYFASTEKSNIIRGWIFGTTLDSKTQSLLIVNNATNVVIKVCEF
QFCNDPFLGVYYHKNNKSWMESEFRVYSSANNCTFEYVSQPFLMDLEGKQGNFKNLREFV
FKNIDGYFKIYSKHTPINLVRGLPQGFSALEPLVDLPIGINITRFQTLLALHISYLTPGD
SSSGWTAGAAAYYVGYLQPRTFLLKYNENGTITDAVDCALDPLSETKCTLKSFTVEKGIY
QTSNFRVQPTESIVRFPNITNLCPFGEVFNATRFASVYAWNRKRISNCVADYSVLYNSAS
FSTFKCYGVSPTKLNDLCFTNVYADSFVIRGDEVRQIAPGQTGNIADYNYKLPDDFTGCV
IAWNSNNLDSKVGGNYNYLYRLFRKSNLKPFERDISTEIYQAGSTPCNGVKGFNCYFPLQ
SYGFQPTYGVGYQPYRVVVLSFELLHAPATVCGPKKSTNLVKNKCVNFNFNGLTGTGVLT
ESNKKFLPFQQFGRDIADTTDAVRDPQTLEILDITPCSFGGVSVITPGTNTSNQVAVLYQ
GVNCTEVPVAIHADQLTPTWRVYSTGSNVFQTRAGCLIGAEHVNNSYECDIPIGAGICAS
YQTQTNSPGSASSVASQSIIAYTMSLGVENSIAYSNNVISIPTNFTISVTTEIIPVSMTK
TSVDCAQYICGDNTECENLLLQYGSFCDQLNRALHGIAVEQDKNLQEVFAQVKQIYKTPP
IKDFGGFNFSQILPDPSKPSKRSFIEDLLFNKVTLADAGFIKQYGDCLGDNAARDLICAQ
SFNGLTVLPPLLTDEMIAAYTSALLAGTITAGWTFGAGAALAIPFALQMAYRFNGIGVTQ
NVLYENQKLIANQFNSAITKIQDSLSSTASALAKLQDVVNQNAQALNTLVKQLSNKFGAI
SSVLNDILSRLDPPEAEVQIDRLITGRLQALQTYVTQQLIRAAEIKASANLAATKMSECV
LGQSKRVNFCGKGYHLMSFPQSAPHGVVFLHVTYVPAQEKNFTTAPAICHDGKAYFPREG
VFVSNGTHWFVTQRNFYEPQIITTDNTFVSGNCDVVIGIVNNTVYDPLQPELDS
SEQ ID NO: 131-B.1.351_Buried_PROSS_1_5
QCVNFTTRTQLPPAYTNSFTRGVYYPDKVFRSSVLHSTQDLFLPFFSNVTWFHAIHVSGT
NGTKRFDNPVLPFNDGVYFASTEKSNIIRGWIFGTTLDSKTQSLLIVNNATNVVIKVCEF
QFCNDPFLGVYYHKNNKSWMESEFRVYSSANNCTFEYVSQPFLMDLEGKQGNFKNLREFV
FKNIDGYFKIYSKHTPINLVRGLPQGFSALEPLVDLPIGINITRFQTLLALHISYLTPGD
SSSGWTAGAAAYYVGYLQPRTFLLKYNENGTITDAVDCALDPLSETKCTLKSFTVEKGIY
QTSNFRVQPTESIVRFPNITNLCPFGEVFNATRFASVYAWNRKRISNCVADYSVLYNSAS
FSTFKCYGVSPTKLNDLCFTNVYADSFVIRGDEVRQIAPGQTGNIADYNYKLPDDFTGCV
IAWNSNNLDSKVGGNYNYLYRLFRKSNLKPFERDISTEPYQAGSTPCNGVKGFNCYFPLQ
SYGFQPTYGVGYQPYRVVVLSFELLHAPATVCGPKKSTNLVKNKCVNFNFNGLTGTGVLT
ESNKKFLPFQQFGRDIADTTDAVRDPQTLEILDITPCSFGGVSVITPGTNTSNQVAVLYQ
GVNCTEVPVAIHADQLTPTWRVYSTGSNVFQTRAGCLIGAEHVNNSYECDIPIGAGICAS
YQTQTNSPGSASSVASQSIIAYTMSLGVENSIAYSNNVIAIPTNFTISVTTEIIPVSMTK
TSVDCAQYICGDNTECENLLLQYGSFCDQLNRALHGIAVEQDKALQEVFAQVKQIYKTPP
IKDFGGFNFSQILPDPSKPSKRSFIEDLLFNKVTLADAGFIKQYGDCLGDNAARDLICAQ
KFNGLTVLPPLLTDEMIAAYTSALLAGTITAGWTFGAGAALAIPFALQMAYRFNGIGVTQ
NVLYENQKLIANQFNSAITKIQDSLSSTASALAKLQDVVNQNAQALNTLVKQLSNNFGAI
SSVLNDILSRLDPPEAEVQIDRLITGRLQALQTYVTQQLIRAAEIKASANLAATKMSECV
LGQSKRVNFCGKGYHLMSFPQSAPHGVVFLHVTYVPAQEKNFTTAPAICHDGKAHFPREG
VFVSNGTHWYVTQRNFYEPQIITTDNTFVSGNCDVVIGIVNNTVYDPLQPELDS
SEQ ID NO: 132-B.1.351_Buried_PROSS_3_0
QCVNFTTRTQLPPAYTNSFTRGVYYPDKVFRSSVLHSTQDLFLPFFSNVTWFHAIHVSGT
NGTKRFDNPVLPFNDGVYFASTEKSNIIRGWIFGTTLDSKTQSLLIVNNATNVVIKVCEF
QFCNDPFLGVYYHKNNKSWMESEFRVYSSANNCTFEYVSQPFLMDLEGKQGNFKNLREFV
FKNIDGYFKIYSKHTPINLVRGLPQGFSALEPLVDLPIGINITRFQTLLALHISYLTPGD
SSSGWTAGAAAYYVGYLQPRTFLLKYNENGTITDAVDCALDPLSETKCTLKSFTVEKGIY
QTSNFRVQPTESIVRFPNITNLCPFGEVFNATRFASVYAWNRKRISNCVADYSVLYNSAS
FSTFKCYGVSPTKLNDLCFTNVYADSFVIRGDEVRQIAPGQTGNIADYNYKLPDDFTGCV
IAWNSNNLDSKVGGNYNYLYRLFRKSNLKPFERDISTEPYQAGSTPCNGVKGFNCYFPLQ
SYGFQPTYGVGYQPYRVVVLSFELLHAPATVCGPKKSTNLVKNKCVNFNFNGLTGTGVLT
ESNKKFLPFQQFGRDTADTTDAVRDPQTLETLDTTPCSFGGVSVTTPGTNTSNQVAVLYQ
GVNCTEVPVATHADQLTPTWRVYSTGSNVFQTRAGCLTGAEHVNNSYECDTPTGAGTCAS
YQTQTNSPGSASSVASQSTTAYTMSLGVENSTAYSNNVTATPTNFTTSVTTETTPVSMTK
TSVDCTQYTCGDSTECENLLLQYGSFCDQLNRALHGTAVEQDKNTQEVFAQVKQTYKTPP
TKDFGGFNFSQTLPDPSKPSKRSFTEDLLFNKVTLADAGFTKQYGDCLGDPAARDLTCAQ
KFNGLTVLPPLLTDEMTAAYTSALLAGTTTAGWTFGAGAALATPFAMQMAYRFNGTGVTQ
NVLYENQKLIANQFNSAIGKIQDSLSSTASALAKLQDVVNQNAQALNTLVKQLSNNFGAI
SSVLNDILSRLDPPEAEVQIDRLITGRLQALQTYVTQQLIRAAEIKASANLAATKMSECV
LGQSKRVNFCGKGYHLMSFPQSAPHGVVFLHVTYVPAQEKNFTTAPAICHDGKAHFPREG
VFVSNGTHWFVTQRNFYEPQIITTDNTFVSGNCDVVIGIVNNTVYDPLQPELDS
SEQ ID NO: 133-B.1.351_Buried_PROSS_5_0
QCVNFTTRTQLPPAYTNSFTRGVYYPDKVFRSSVLHSTQDLFLPFFSNVTWFHAIHVSGT
NGTKRFDNPVLPFNDGVYFASTEKSNIIRGWIFGTTLDSKTQSLLIVNNATNVVIKVCEF
QFCNDPFLGVYYHKNNKSWMESEFRVYSSANNCTFEYVSQPFLMDLEGKQGNFKNLREFV
FKNIDGYFKIYSKHTPINLVRGLPQGFSALEPLVDLPIGINITRFQTLLALHISYLTPGD
SSSGWTAGAAAYYVGYLQPRTFLLKYNENGTITDAVDCALDPLSETKCTLKSFTVEKGIY
QTSNFRVQPTESIVRFPNITNLCPFGEVFNATRFASVYAWNRKRISNCVADYSVLYNSAS
FSTFKCYGVSPTKLNDLCFTNVYADSFVIRGDEVRQIAPGQTGNIADYNYKLPDDFTGCV
IAWNSNNLDSKVGGNYNYLYRLFRKSNLKPFERDISTEIYQAGSTPCNGVKGFNCYFPLQ
SYGFQPTYGVGYQPYRVVVLSFELLHAPATVCGPKKSTNLVKNKCVNFNFNGLTGTGVLT
ESNKKFLPFQQFGRDIADTTDAVRDPQTLEILDITPCSFGGVSVITPGTNTSNQVAVLYQ
GVNCTEVPVAIHADQLTPTWRVYSTGSNVFQTRAGCLIGAEHVNNSYECDIPIGAGICAS
YQTQTNSPGSASSVASQSIIAYTMSLGVENSIAYSNNVIAIPTNFTISVTTEIIPVSMTK
TSVDCAQYICGDSTECENLLLQYGSFCTQLNRALHGIAVEQDKNIQEVFAQVKQIYKTPP
IKDFGGFNFSQILPDPSKPSKRSFIEDLLFNKVTLADAGFIKQYGDCLGDPAARDLICAQ
KFNGLTVLPPLLTDEMIAAYTSALLAGTITAGWTFGAGAALAIPFAMQMAYRFNGIGVTQ
NVLYENQKLIANQFNSAIGKIQDSLSSTASALAKLQDVVNQNAQALNTLVKQLSSNFGAI
SSVLNDILSRLDPPEAEVQIDRLITGRLQALQTYVTQQLIRAAEIKASANLAATKMSECV
LGQSKRVDFCGKGYHLMSFPQSAPHGVVFLHVTYVPAQEKNFTTAPAICHDGKAHFPREG
VFVSNGTHWFVTQRNFYEPQIITTDNTFVSGNCDVVIGIVNNTVYDPLQPELDS
SEQ ID NO: 134-B.1.351_Buried_PROSS_6_0
QCVNFTTRTQLPPAYTNSFTRGVYYPDKVFRSSVLHSTQDLFLPFFSNVTWFHAIHVSGT
NGTKRFDNPVLPFNDGVYFASTEKSNIIRGWIFGTTLDSKTQSLLIVNNATNVVIKVCEF
QFCNDPFLGVYYHKNNKSWMESEFRVYSSANNCTFEYVSQPFLMDLEGKQGNFKNLREFV
FKNIDGYFKIYSKHTPINLVRGLPQGFSALEPLVDLPIGINITRFQTLLALHISYLTPGD
SSSGWTAGAAAYYVGYLQPRTFLLKYNENGTITDAVDCALDPLSETKCTLKSFTVEKGIY
QTSNFRVQPTESIVRFPNITNLCPFGEVFNATRFASVYAWNRKRISNCVADYSVLYNSAS
FSTFKCYGVSPTKLNDLCFTNVYADSFVIRGDEVRQIAPGQTGNIADYNYKLPDDFTGCV
IAWNSNNLDSKVGGNYNYLYRLFRKSNLKPFERDISTEPYQAGSTPCNGVKGFNCYFPLQ
SYGFQPTYGVGYQPYRVVVLSFELLHAPATVCGPKKSTNLVKNKCVNFNFNGLTGTGVLT
ESNKKFLPFQQFGRDIADTTDAVRDPQTLEILDITPCSFGGVSVITPGTNTSNQVAVLYQ
GVNCTEVPVAIHADQLTPTWRVYSTGSNVFQTRAGCLIGAEHVNNSYECDIPIGAGICAS
YQTQTNSPGSASSVASQSIIAYTMSLGVENSIAYSNNVIAIPTNFTISVTTEIIPVSMTK
TSVDCAQYICGDSTECENLLLQYGSFCTQLNRALTGIAVEQDKNTQEVFAQVKQIYKTPP
IKDFGGFNFSQILPDPSKPSKRSFIEDLLFNKVTLADAGFIKQYGDCLGDPAARDLICAQ
KFNGLTVLPPLLTDEMIAAYTSALLAGTITSGWTFGAGAALAIPFAMQMAYRFNGIGVTQ
NVLYENQKLIANQFNSAIGKIQDSLSSTASALGKLQDVVNQNAQALNTLVKQLSSNFGAI
SSVLNDILSRLDPPEAEVQIDRLITGRLQALQTYVTQQLIRAAEIKASANLAATKMSECV
LGQSKRVDFCGKGYHLMSFPQSAPHGVVFLHVTYVPAQEKNFTTAPAICHDGKAHFPREG
VFVSNGTHWFVTORNFYEPQIITTDNTFVSGNCDVVIGIVNNTVYDPLQPELDS

The application's sequence listing, which the Patent Office published only in electronic form, follows.

SEQUENCE LISTING (134 sequences)

SEQ ID NO: 1 - DNA, 29903 bp, Severe Acute Respiratory Syndrome Coronavirus 2
attaaaggtttataccttcccaggtaacaaaccaaccaactttcgatctcttgtagatctgttctctaaacgaactttaaaatctgtgtggctgtcactcggctgcatgcttagtgcactcacgcagtataattaataactaattactgtcgttgacaggacacgagtaactcgtctatcttctgcaggctgcttacggtttcgtccgtgttgcagccgatcatcagcacatctaggtttcgtccgggtgtgaccgaaaggtaagatggagagccttgtccctggtttcaacgagaaaacacacgtccaactcagtttgcctgttttacaggttcgcgacgtgctcgtacgtggctttggagactccgtggaggaggtcttatcagaggcacgtcaacatcttaaagatggcacttgtggcttagtagaagttgaaaaaggcgttttgcctcaacttgaacagccctatgtgttcatcaaacgttcggatgctcgaactgcacctcatggtcatgttatggttgagctggtagcagaactcgaaggcattcagtacggtcgtagtggtgagacacttggtgtccttgtccctcatgtgggcgaaataccagtggcttaccgcaaggttcttcttcgtaagaacggtaataaaggagctggtggccatagttacggcgccgatctaaagtcatttgacttaggcgacgagcttggcactgatccttatgaagattttcaagaaaactggaacactaaacatagcagtggtgttacccgtgaactcatgcgtgagcttaacggaggggcatacactcgctatgtcgataacaacttctgtggccctgatggctaccctcttgagtgcattaaagaccttctagcacgtgctggtaaagcttcatgcactttgtccgaacaactggactttattgacactaagaggggtgtatactgctgccgtgaacatgagcatgaaattgcttggtacacggaacgttctgaaaagagctatgaattgcagacaccttttgaaattaaattggcaaagaaatttgacaccttcaatggggaatgtccaaattttgtatttcccttaaattccataatcaagactattcaaccaagggttgaaaagaaaaagcttgatggctttatgggtagaattcgatctgtctatccagttgcgtcaccaaatgaatgcaaccaaatgtgcctttcaactctcatgaagtgtgatcattgtggtgaaacttcatggcagacgggcgattttgttaaagccacttgcgaattttgtggcactgagaatttgactaaagaaggtgccactacttgtggttacttaccccaaaatgctgttgttaaaatttattgtccagcatgtcacaattcagaagtaggacctgagcatagtcttgccgaataccataatgaatctggcttgaaaaccattcttcgtaagggtggtcgcactattgcctttggaggctgtgtgttctcttatgttggttgccataacaagtgtgcctattgggttccacgtgctagcgctaacataggttgtaaccatacaggtgttgttggagaaggttccgaaggtcttaatgacaaccttcttgaaatactccaaaaagagaaagtcaacatcaatattgttggtgactttaaacttaatgaagagatcgccattattttggcatctttttctgcttccacaagtgcttttgtggaaactgtgaaaggtttggattataaagcattcaaacaaattgttgaatcctgtggtaattttaaagttacaaaaggaaaagctaaaaaaggtgcctggaatattggtgaacagaaatcaatactgagtcctctttatgcatttgcatcagaggctgctcgtgttgtacgatcaattttctcccgcactcttgaaactgctcaaaattctgtgcgtgttttacagaaggccgctataacaatactagatggaatttcacagtattcactgagactcattgatgctatgatgttcacatctgatttggctactaacaatctagttgtaatggcctacattacaggtggtgttgttcagttgacttcgcagtggctaactaacatctttggcactgtttatgaaaaactcaaacccgtccttgattggcttgaagagaagtttaaggaaggtgtagagtttcttagagacggttgggaaattgttaaatttatctcaacctgtgcttgtgaaattgtcggtggacaaattgtcacctgtgcaaaggaaattaaggagagtgttcagacattctttaagcttgtaaataaatttttggctttgtgtgctgactctatcattattggtggagctaaacttaaagccttgaatttaggtgaaacatttgtcacgcactcaaagggattgtacagaaagtgtgttaaatccagagaagaaactggcctactcatgcctctaaaagccccaaaagaaattatcttcttagagggagaaacacttcccacagaagtgttaacagaggaagttgtcttgaaaactggtgatttacaaccattagaacaacctactagtgaagctgttgaagctccattggttggtacaccagtttgtattaacgggcttatgttgctcgaaatcaaagacacagaaaagtactgtgcccttgcacctaatatgatggtaacaaacaataccttcacactcaaaggcggtgcaccaacaaaggttacttttggtgatgacactgtgatagaagtgcaaggttacaagagtgtgaatatcacttttgaacttgatgaaaggattgataaagtacttaatgagaagtgctctgcctatacagttgaactcggtacagaagtaaatgagttcgcctgtgttgtggcagatgctgtcataaaaactttgcaaccagtatctgaattacttacaccactgggcattgatttagatgagtggagtatggctacatactacttatttgatgagtctggtgagtttaaattggcttcacatatgtattgttctttctaccctccagatgaggatgaagaagaaggtgattgtgaagaagaagagtttgagccatcaactcaatatgagtatggtactgaagatgattaccaaggtaaacctttggaatttggtgccacttctgctgctcttcaacctgaagaagagcaagaagaagattggttagatgatgatagtcaacaaactgttggtcaacaagacggcagtgaggacaatcagacaactactattcaaacaattgttgaggttcaacctcaattagagatggaacttacaccagttgttcagactattgaagtgaatagttttagtggttatttaaaacttactgacaatgtatacattaaaaatgcagacattgtggaagaagctaaaaaggtaaaaccaacagtggttgttaatgcagccaatgtttaccttaaacatggaggaggtgttgcaggagccttaaataaggctactaacaatgccatgcaagttgaatctgatgattacatagctactaatggaccacttaaagtgggtggtagttgtgttttaagcggacacaatcttgctaaacactgtcttcatgttgtcggcccaaatgttaacaaaggtgaagacattcaacttcttaagagtgcttatgaaaattttaatcagcacgaagttctacttgcaccattattatcagctggtatttttggtgctgaccctatacattctttaagagtttgtgtagatactgttcgcacaaatgtctacttagctgtctttgataaaaatctctatgacaaacttgtttcaagctttttggaaatgaagagtgaaaagcaagttgaacaaaagatcgctgagattcctaaagaggaagttaagccatttataactgaaagtaaaccttcagttgaacagagaaaacaagatgataagaaaatcaaagcttgtgttgaagaagttacaacaactctggaagaaactaagttcctcacagaaaacttgttactttatattgacattaatggcaatcttcatccagattctgccactcttgttagtgacattgacatcactttcttaaagaaagatgctccatatatagtgggtgatgttgttcaagagggtgttttaactgctgtggttatacctactaaaaaggctggtggcactactgaaatgctagcgaaagctttgagaaaagtgccaacagacaattatataaccacttacccgggtcagggtttaaatggttacactgtagaggaggcaaagacagtgcttaaaaagtgtaaaagtgccttttacattctaccatctattatctctaatgagaagcaagaaattcttggaactgtttcttggaatttgcgagaaatgcttgcacatgcagaagaaacacgcaaattaatgcctgtctgtgtggaaactaaagccatagtttcaactatacagcgtaaatataagggtattaaaatacaagagggtgtggttgattatggtgctagattttacttttacaccagtaaaacaactgtagcgtcacttatcaacacacttaacgatctaaatgaaactcttgttacaatgccacttggctatgtaacacatggcttaaatttggaagaagctgctcggtatatgagatctctcaaagtgccagctacagtttctgtttcttcacctgatgctgttacagcgtataatggttatcttacttcttcttctaaaacacctgaagaacattttattgaaaccatctcacttgctggttcctataaagattggtcctattctggacaatctacacaactaggtatagaatttcttaagagaggtgataaaagtgtatattacactagtaatcctaccacattccacctagatggtgaagttatcacctttgacaatcttaagacacttctttctttgagagaagtgaggactattaaggtgtttacaacagtagacaacattaacctccacacgcaagttgtggacatgtcaatgacatatggacaacagtttggtccaacttatttggatggagctgatgttactaaaataaaacctcataattcacatgaaggtaaaacattttatgttttacctaatgatgacactctacgtgttgaggcttttgagtactaccacacaactgatcctagttttctgggtaggtacatgtcagcattaaatcacactaaaaagtggaaatacccacaagttaatggtttaacttctattaaatgggcagataacaactgttatcttgccactgcattgttaacactccaacaaatagagttgaagtttaatccacctgctctacaagatgcttattacagagcaagggctggtgaagctgctaacttttgtgcacttatcttagcctactgtaataagacagtaggtgagttaggtgatgttagagaaacaatgagttacttgtttcaacatgccaatttagattcttgcaaaagagtcttgaacgtggtgtgtaaaacttgtggacaacagcagacaacccttaagggtgtagaagctgttatgtacatgggcacactttcttatgaacaatttaagaaaggtgttcagataccttgtacgtgtggtaaacaagctacaaaatatctagtacaacaggagtcaccttttgttatgatgtcagcaccacctgctcagtatgaacttaagcatggtacatttacttgtgctagtgagtacactggtaattaccagtgtggtcactataaacatataacttctaaagaaactttgtattgcatagacggtgctttacttacaaagtcctcagaatacaaaggtcctattacggatgttttctacaaagaaaacagttacacaacaaccataaaaccagttacttataaattggatggtgttgtttgtacagaaattgaccctaagttggacaattattataagaaagacaattcttatttcacagagcaaccaattgatcttgtaccaaaccaaccatatccaaacgcaagcttcgataattttaagtttgtatgtgataatatcaaatttgctgatgatttaaaccagttaactggttataagaaacctgcttcaagagagcttaaagttacatttttccctgacttaaatggtgatgtggtggctattgattataaacactacacaccctcttttaagaaaggagctaaattgttacataaacctattgtttggcatgttaacaatgcaactaataaagccacgtataaaccaaatacctggtgtatacgttgtctttggagcacaaaaccagttgaaacatcaaattcgtttgatgtactgaagtcagaggacgcgcagggaatggataatcttgcctgcgaagatctaaaaccagtctctgaagaagtagtggaaaatcctaccatacagaaagacgttcttgagtgtaatgtgaaaactaccgaagttgtaggagacattatacttaaaccagcaaataatagtttaaaaattacagaagaggttggccacacagatctaatggctgcttatgtagacaattctagtcttactattaagaaacctaatgaattatctagagtattaggtttgaaaacccttgctactcatggtttagctgctgttaatagtgtcccttgggatactatagctaattatgctaagccttttcttaacaaagttgttagtacaactactaacatagttacacggtgtttaaaccgtgtttgtactaattatatgccttatttctttactttattgctacaattgtgtacttttactagaagtacaaattctagaattaaagcatctatgccgactactatagcaaagaatactgttaagagtgtcggtaaattttgtctagaggcttcatttaattatttgaagtcacctaatttttctaaactgataaatattataatttggtttttactattaagtgtttgcctaggttctttaatctactcaaccgctgctttaggtgttttaatgtctaatttaggcatgccttcttactgtactggttacagagaaggctatttgaactctactaatgtcactattgcaacctactgtactggttctataccttgtagtgtttgtcttagtggtttagattctttagacacctatccttctttagaaactatacaaattaccatttcatcttttaaatgggatttaactgcttttggcttagttgcagagtggtttttggcatatattcttttcactaggtttttctatgtacttggattggctgcaatcatgcaattgtttttcagctattttgcagtacattttattagtaattcttggcttatgtggttaataattaatcttgtacaaatggccccgatttcagctatggttagaatgtacatcttctttgcatcattttattatgtatggaaaagttatgtgcatgttgtagacggttgtaattcatcaacttgtatgatgtgttacaaacgtaatagagcaacaagagtcgaatgtacaactattgttaatggtgttagaaggtccttttatgtctatgctaatggaggtaaaggcttttgcaaactacacaattggaattgtgttaattgtgatacattctgtgctggtagtacatttattagtgatgaagttgcgagagacttgtcactacagtttaaaagaccaataaatcctactgaccagtcttcttacatcgttgatagtgttacagtgaagaatggttccatccatctttactttgataaagctggtcaaaagacttatgaaagacattctctctctcattttgttaacttagacaacctgagagctaataacactaaaggttcattgcctattaatgttatagtttttgatggtaaatcaaaatgtgaagaatcatctgcaaaatcagcgtctgtttactacagtcagcttatgtgtcaacctatactgttactagatcaggcattagtgtctgatgttggtgatagtgcggaagttgcagttaaaatgtttgatgcttacgttaatacgttttcatcaacttttaacgtaccaatggaaaaactcaaaacactagttgcaactgcagaagctgaacttgcaaagaatgtgtccttagacaatgtcttatctacttttatttcagcagctcggcaagggtttgttgattcagatgtagaaactaaagatgttgttgaatgtcttaaattgtcacatcaatctgacatagaagttactggcgatagttgtaataactatatgctcacctataacaaagttgaaaacatgacaccccgtgaccttggtgcttgtattgactgtagtgcgcgtcatattaatgcgcaggtagcaaaaagtcacaacattgctttgatatggaacgttaaagatttcatgtcattgtctgaacaactacgaaaacaaatacgtagtgctgctaaaaagaataacttaccttttaagttgacatgtgcaactactagacaagttgttaatgttgtaacaacaaagatagcacttaagggtggtaaaattgttaataattggttgaagcagttaattaaagttacacttgtgttcctttttgttgctgctattttctatttaataacacctgttcatgtcatgtctaaacatactgacttttcaagtgaaatcataggatacaaggctattgatggtggtgtcactcgtgacatagcatctacagatacttgttttgctaacaaacatgctgattttgacacatggtttagccagcgtggtggtagttatactaatgacaaagcttgcccattgattgctgcagtcataacaagagaagtgggttttgtcgtgcctggtttgcctggcacgatattacgcacaactaatggtgactttttgcatttcttacctagagtttttagtgcagttggtaacatctgttacacaccatcaaaacttatagagtacactgactttgcaacatcagcttgtgttttggctgctgaatgtacaatttttaaagatgcttctggtaagccagtaccatattgttatgataccaatgtactagaaggttctgttgcttatgaaagtttacgccctgacacacgttatgtgctcatggatggctctattattcaatttcctaacacctaccttgaaggttctgttagagtggtaacaacttttgattctgagtactgtaggcacggcacttgtgaaagatcagaagctggtgtttgtgtatctactagtggtagatgggtacttaacaatgattattacagatctttaccaggagttttctgtggtgtagatgctgtaaatttacttactaatatgtttacaccactaattcaacctattggtgctttggacatatcagcatctatagtagctggtggtattgtagctatcgtagtaacatgccttgcctactattttatgaggtttagaagagcttttggtgaatacagtcatgtagttgcctttaatactttactattccttatgtcattcactgtactctgtttaacaccagtttactcattcttacctggtgtttattctgttatttacttgtacttgacattttatcttactaatgatgtttcttttttagcacatattcagtggatggttatgttcacacctttagtacctttctggataacaattgcttatatcatttgtatttccacaaagcatttctattggttctttagtaattacctaaagagacgtgtagtctttaatggtgtttcctttagtacttttgaagaagctgcgctgtgcacctttttgttaaataaagaaatgtatctaaagttgcgtagtgatgtgctattacctcttacgcaatataatagatacttagctctttataataagtacaagtattttagtggagcaatggatacaactagctacagagaagctgcttgttgtcatctcgcaaaggctctcaatgacttcagtaactcaggttctgatgttctttaccaaccaccacaaacctctatcacctcagctgttttgcagagtggttttagaaaaatggcattcccatctggtaaagttgagggttgtatggtacaagtaacttgtggtacaactacacttaacggtctttggcttgatgacgtagtttactgtccaagacatgtgatctgcacctctgaagacatgcttaaccctaattatgaagatttactcattcgtaagtctaatcataatttcttggtacaggctggtaatgttcaactcagggttattggacattctatgcaaaattgtgtacttaagcttaaggttgatacagccaatcctaagacacctaagtataagtttgttcgcattcaaccaggacagactttttcagtgttagcttgttacaatggttcaccatctggtgtttaccaatgtgctatgaggcccaatttcactattaagggttcattccttaatggttcatgtggtagtgttggttttaacatagattatgactgtgtctctttttgttacatgcaccatatggaattaccaactggagttcatgctggcacagacttagaaggtaacttttatggaccttttgttgacaggcaaacagcacaagcagctggtacggacacaactattacagttaatgttttagcttggttgtacgctgctgttataaatggagacaggtggtttctcaatcgatttaccacaactcttaatgactttaaccttgtggctatgaagtacaattatgaacctctaacacaagaccatgttgacatactaggacctctttctgctcaaactggaattgccgttttagatatgtgtgcttcattaaaagaattactgcaaaatggtatgaatggacgtaccatattgggtagtgctttattagaagatgaatttacaccttttgatgttgttagacaatgctcaggtgttactttccaaagtgcagtgaaaagaacaatcaagggtacacaccactggttgttactcacaattttgacttcacttttagttttagtccagagtactcaatggtctttgttcttttttttgtatgaaaatgcctttttaccttttgctatgggtattattgctatgtctgcttttgcaatgatgtttgtcaaacataagcatgcatttctctgtttgtttttgttaccttctcttgccactgtagcttattttaatatggtctatatgcctgctagttgggtgatgcgtattatgacatggttggatatggttgatactagtttgtctggttttaagctaaaagactgtgttatgtatgcatcagctgtagtgttactaatccttatgacagcaagaactgtgtatgatgatggtgctaggagagtgtggacacttatgaatgtcttgacactcgtttataaagtttattatggtaatgctttagatcaagccatttccatgtgggctcttataatctctgttacttctaactactcaggtgtagttacaactgtcatgtttttggccagaggtattgtttttatgtgtgttgagtattgccctattttcttcataactggtaatacacttcagtgtataatgctagtttattgtttcttaggctatttttgtacttgttactttggcctcttttgtttactcaaccgctactttagactgactcttggtgtttatgattacttagtttctacacaggagtttagatatatgaattcacagggactactcccacccaagaatagcatagatgccttcaaactcaacattaaattgttgggtgttggtggcaaaccttgtatcaaagtagccactgtacagtctaaaatgtcagatgtaaagtgcacatcagtagtcttactctcagttttgcaacaactcagagtagaatcatcatctaaattgtgggctcaatgtgtccagttacacaatgacattctcttagctaaagatactactgaagcctttgaaaaaatggtttcactactttctgttttgctttccatgcagggtgctgtagacataaacaagctttgtgaagaaatgctggacaacagggcaaccttacaagctatagcctcagagtttagttcccttccatcatatgcagcttttgctactgctcaagaagcttatgagcaggctgttgctaatggtgattctgaagttgttcttaaaaagttgaagaagtctttgaatgtggctaaatctgaatttgaccgtgatgcagccatgcaacgtaagttggaaaagatggctgatcaagctatgacccaaatgtataaacaggctagatctgaggacaagagggcaaaagttactagtgctatgcagacaatgcttttcactatgcttagaaagttggataatgatgcactcaacaacattatcaacaatgcaagagatggttgtgttcccttgaacataatacctcttacaacagcagccaaactaatggttgtcataccagactataacacatataaaaatacgtgtgatggtacaacatttacttatgcatcagcattgtgggaaatccaacaggttgtagatgcagatagtaaaattgttcaacttagtgaaattagtatggacaattcacctaatttagcatggcctcttattgtaacagctttaagggccaattctgctgtcaaattacagaataatgagcttagtcctgttgcactacgacagatgtcttgtgctgccggtactacacaaactgcttgcactgatgacaatgcgttagcttactacaacacaacaaagggaggtaggtttgtacttgcactgttatccgatttacaggatttgaaatgggctagattccctaagagtgatggaactggtactatctatacagaactggaaccaccttgtaggtttgttacagacacacctaaaggtcctaaagtgaagtatttatactttattaaaggattaaacaacctaaatagaggtatggtacttggtagtttagctgccacagtacgtctacaagctggtaatgcaacagaagtgcctgccaattcaactgtattatctttctgtgcttttgctgtagatgctgctaaagcttacaaagattatctagctagtgggggacaaccaatcactaattgtgttaagatgttgtgtacacacactggtactggtcaggcaataacagttacaccggaagccaatatggatcaagaatcctttggtggtgcatcgtgttgtctgtactgccgttgccacatagatcatccaaatcctaaaggattttgtgacttaaaaggtaagtatgtacaaatacctacaacttgtgctaatgaccctgtgggttttacacttaaaaacacagtctgtaccgtctgcggtatgtggaaaggttatggctgtagttgtgatcaactccgcgaacccatgcttcagtcagctgatgcacaatcgtttttaaacgggtttgcggtgtaagtgcagcccgtcttacaccgtgcggcacaggcactagtactgatgtcgtatacagggcttttgacatctacaatgataaagtagctggttttgctaaattcctaaaaactaattgttgtcgcttccaagaaaaggacgaagatgacaatttaattgattcttactttgtagttaagagacacactttctctaactaccaacatgaagaaacaatttataatttacttaaggattgtccagctgttgctaaacatgacttctttaagtttagaatagacggtgacatggtaccacatatatcacgtcaacgtcttactaaatacacaatggcagacctcgtctatgctttaaggcattttgatgaaggtaattgtgacacattaaaagaaatacttgtcacatacaattgttgtgatgatgattatttcaataaaaaggactggtatgattttgtagaaaacccagatatattacgcgtatacgccaacttaggtgaacgtgtacgccaagctttgttaaaaacagtacaattctgtgatgccatgcgaaatgctggtattgttggtgtactgacattagataatcaagatctcaatggtaactggtatgatttcggtgatttcatacaaaccacgccaggtagtggagttcctgttgtagattcttattattcattgttaatgcctatattaaccttgaccagggctttaactgcagagtcacatgttgacactgacttaacaaagccttacattaagtgggatttgttaaaatatgacttcacggaagagaggttaaaactctttgaccgttattttaaatattgggatcagacataccacccaaattgtgttaactgtttggatgacagatgcattctgcattgtgcaaactttaatgttttattctctacagtgttcccacctacaagttttggaccactagtgagaaaaatatttgttgatggtgttccatttgtagtttcaactggataccacttcagagagctaggtgttgtacataatcaggatgtaaacttacatagctctagacttagttttaaggaattacttgtgtatgctgctgaccctgctatgcacgctgcttctggtaatctattactagataaacgcactacgtgcttttcagtagctgcacttactaacaatgttgcttttcaaactgtcaaacccggtaattttaacaaagacttctatgactttgctgtgtctaagggtttctttaaggaaggaagttctgttgaattaaaacacttcttctttgctcaggatggtaatgctgctatcagcgattatgactactatcgttataatctaccaacaatgtgtgatatcagacaactactatttgtagttgaagttgttgataagtactttgattgttacgatggtggctgtattaatgctaaccaagtcatcgtcaacaacctagacaaatcagctggttttccatttaataaatggggtaaggctagactttattatgattcaatgagttatgaggatcaagatgcacttttcgcatatacaaaacgtaatgtcatccctactataactcaaatgaatcttaagtatgccattagtgcaaagaatagagctcgcaccgtagctggtgtctctatctgtagtactatgaccaatagacagtttcatcaaaaattattgaaatcaatagccgccactagaggagctactgtagtaattggaacaagcaaattctatggtggttggcacaacatgttaaaaactgtttatagtgatgtagaaaaccctcaccttatgggttgggattatcctaaatgtgatagagccatgcctaacatgcttagaattatggcctcacttgttcttgctcgcaaacatacaacgtgttgtagcttgtcacaccgtttctatagattagctaatgagtgtgctcaagtattgagtgaaatggtcatgtgtggcggttcactatatgttaaaccaggtggaacctcatcaggagatgccacaactgcttatgctaatagtgtttttaacatttgtcaagctgtcacggccaatgttaatgcacttttatctactgatggtaacaaaattgccgataagtatgtccgcaatttacaacacagactttatgagtgtctctatagaaatagagatgttgacacagactttgtgaatgagttttacgcatatttgcgtaaacatttctcaatgatgatactctctgacgatgctgttgtgtgtttcaatagcacttatgcatctcaaggtctagtggctagcataaagaactttaagtcagttctttattatcaaaacaatgtttttatgtctgaagcaaaatgttggactgagactgaccttactaaaggacctcatgaattttgctctcaacatacaatgctagttaaacagggtgatgattatgtgtaccttccttacccagatccatcaagaatcctaggggccggctgttttgtagatgatatcgtaaaaacagatggtacacttatgattgaacggttcgtgtctttagctatagatgcttacccacttactaaacatcctaatcaggagtatgctgatgtctttcatttgtacttacaatacataagaaagctacatgatgagttaacaggacacatgttagacatgtattctgttatgcttactaatgataacacttcaaggtattgggaacctgagttttatgaggctatgtacacaccgcatacagtcttacaggctgttggggcttgtgttctttgcaattcacagacttcattaagatgtggtgcttgcatacgtagaccattcttatgttgtaaatgctgttacgaccatgtcatatcaacatcacataaattagtcttgtctgttaatccgtatgtttgcaatgctccaggttgtgatgtcacagatgtgactcaactttacttaggaggtatgagctattattgtaaatcacataaaccacccattagttttccattgtgtgctaatggacaagtttttggtttatataaaaatacatgtgttggtagcgataatgttactgactttaatgcaattgcaacatgtgactggacaaatgctggtgattacattttagctaacacctgtactgaaagactcaagctttttgcagcagaaacgctcaaagctactgaggagacatttaaactgtcttatggtattgctactgtacgtgaagtgctgtctgacagagaattacatctttcatgggaagttggtaaacctagaccaccacttaaccgaaattatgtctttactggttatcgtgtaactaaaaacagtaaagtacaaataggagagtacacctttgaaaaaggtgactatggtgatgctgttgtttaccgaggtacaacaacttacaaattaaatgttggtgattattttgtgctgacatcacatacagtaatgccattaagtgcacctacactagtgccacaagagcactatgttagaattactggcttatacccaacactcaatatctcagatgagttttctagcaatgttgcaaattatcaaaaggttggtatgcaaaagtattctacactccagggaccacctggtactggtaagagtcattttgctattggcctagctctctactacccttctgctcgcatagtgtatacagcttgctctcatgccgctgttgatgcactatgtgagaaggcattaaaatatttgcctatagataaatgtagtagaattatacctgcacgtgctcgtgtagagtgttttgataaattcaaagtgaattcaacattagaacagtatgtcttttgtactgtaaatgcattgcctgagacgacagcagatatagttgtctttgatgaaatttcaatggccacaaattatgatttgagtgttgtcaatgccagattacgtgctaagcactatgtgtacattggcgaccctgctcaattacctgcaccacgcacattgctaactaagggcacactagaaccagaatatttcaattcagtgtgtagacttatgaaaactataggtccagacatgttcctcggaacttgtcggcgttgtcctgctgaaattgttgacactgtgagtgctttggtttatgataataagcttaaagcacataaagacaaatcagctcaatgctttaaaatgttttataagggtgttatcacgcatgatgtttcatctgcaattaacaggccacaaataggcgtggtaagagaattccttacacgtaaccctgcttggagaaaagctgtctttatttcaccttataattcacagaatgctgtagcctcaaagattttgggactaccaactcaaactgttgattcatcacagggctcagaatatgactatgtcatattcactcaaaccactgaaacagctcactcttgtaatgtaaacagatttaatgttgctattaccagagcaaaagtaggcatactttgcataatgtctgatagagacctttatgacaagttgcaatttacaagtcttgaaattccacgtaggaatgtggcaactttacaagctgaaaatgtaacaggactctttaaagattgtagtaaggtaatcactgggttacatcctacacaggcacctacacacctcagtgttgacactaaattcaaaactgaaggtttatgtgttgacatacctggcatacctaaggacatgacctatagaagactcatctctatgatgggttttaaaatgaattatcaagttaatggttaccctaacatgtttatcacccgcgaagaagctataagacatgtacgtgcatggattggcttcgatgtcgaggggtgtcatgctactagagaagctgttggtaccaatttacctttacagctaggtttttctacaggtgttaacctagttgctgtacctacaggttatgttgatacacctaataatacagatttttccagagttagtgctaaaccaccgcctggagatcaatttaaacacctcataccacttatgtacaaaggacttccttggaatgtagtgcgtataaagattgtacaaatgttaagtgacacacttaaaaatctctctgacagagtcgtatttgtcttatgggcacatggctttgagttgacatctatgaagtattttgtgaaaataggacctgagcgcacctgttgtctatgtgatagacgtgccacatgcttttccactgcttcagacacttatgcctgttggcatcattctattggatttgattacgtctataatccgtttatgattgatgttcaacaatggggttttacaggtaacctacaaagcaaccatgatctgtattgtcaagtccatggtaatgcacatgtagctagttgtgatgcaatcatgactaggtgtctagctgtccacgagtgctttgttaagcgtgttgactggactattgaatatcctataattggtgatgaactgaagattaatgcggcttgtagaaaggttcaacacatggttgttaaagctgcattattagcagacaaattcccagttcttcacgacattggtaaccctaaagctattaagtgtgtacctcaagctgatgtagaatggaagttctatgatgcacagccttgtagtgacaaagcttataaaatagaagaattattctattcttatgccacacattctgacaaattcacagatggtgtatgcctattttggaattgcaatgtcgatagatatcctgctaattccattgtttgtagatttgacactagagtgctatctaaccttaacttgcctggttgtgatggtggcagtttgtatgtaaataaacatgcattccacacaccagcttttgataaaagtgcttttgttaatttaaaacaattaccatttttctattactctgacagtccatgtgagtctcatggaaaacaagtagtgtcagatatagattatgtaccactaaagtctgctacgtgtataacacgttgcaatttaggtggtgctgtctgtagacatcatgctaatgagtacagattgtatctcgatgcttataacatgatgatctcagctggctttagcttgtgggtttacaaacaatttgatacttataacctctggaacacttttacaagacttcagagtttagaaaatgtggcttttaatgttgtaaataagggacactttgatggacaacagggtgaagtaccagtttctatcattaataacactgtttacacaaaagttgatggtgttgatgtagaattgtttgaaaataaaacaacattacctgttaatgtagcatttgagctttgggctaagcgcaacattaaaccagtaccagaggtgaaaatactcaataatttgggtgtggacattgctgctaatactgtgatctgggactacaaaagagatgctccagcacatatatctactattggtgtttgttctatgactgacatagccaagaaaccaactgaaacgatttgtgcaccactcactgtcttttttgatggtagagttgatggtcaagtagacttatttagaaatgcccgtaatggtgttcttattacagaaggtagtgttaaaggtttacaaccatctgtaggtcccaaacaagctagtcttaatggagtcacattaattggagaagccgtaaaaacacagttcaattattataagaaagttgatggtgttgtccaacaattacctgaaacttactttactcagagtagaaatttacaagaatttaaacccaggagtcaaatggaaattgatttcttagaattagctatggatgaattcattgaacggtataaattagaaggctatgccttcgaacatatcgtttatggagattttagtcatagtcagttaggtggtttacatctactgattggactagctaaacgttttaaggaatcaccttttgaattagaagattttattcctatggacagtacagttaaaaactatttcataacagatgcgcaaacaggttcatctaagtgtgtgtgttctgttattgatttattacttgatgattttgttgaaataataaaatcccaagatttatctgtagtttctaaggttgtcaaagtgactattgactatacagaaatttcatttatgctttggtgtaaagatggccatgtagaaacattttacccaaaattacaatctagtcaagcgtggcaaccgggtgttgctatgcctaatctttacaaaatgcaaagaatgctattagaaaagtgtgaccttcaaaattatggtgatagtgcaacattacctaaaggcataatgatgaatgtcgcaaaatatactcaactgtgtcaatatttaaacacattaacattagctgtaccctataatatgagagttatacattttggtgctggttctgataaaggagttgcaccaggtacagctgttttaagacagtggttgcctacgggtacgctgcttgtcgattcagatcttaatgactttgtctctgatgcagattcaactttgattggtgattgtgcaactgtacatacagctaataaatgggatctcattattagtgatatgtacgaccctaagactaaaaatgttacaaaagaaaatgactctaaagagggttttttcacttacatttgtgggtttatacaacaaaagctagctcttggaggttccgtggctataaagataacagaacattcttggaatgctgatctttataagctcatgggacacttcgcatggtggacagcctttgttactaatgtgaatgcgtcatcatctgaagcatttttaattggatgtaattatcttggcaaaccacgcgaacaaatagatggttatgtcatgcatgcaaattacatattttggaggaatacaaatccaattcagttgtcttcctattctttatttgacatgagtaaatttccccttaaattaaggggtactgctgttatgtctttaaaagaaggtcaaatcaatgatatgattttatctcttcttagtaaaggtagacttataattagagaaaacaacagagttgttatttctagtgatgttcttgttaacaactaaacgaacaatgtttgtttttcttgttttattgccactagtctctagtcagtgtgttaatcttacaaccagaactcaattaccccctgcatacactaattctttcacacgtggtgtttattaccctgacaaagttttcagatcctcagttttacattcaactcaggacttgttcttacctttcttttccaatgttacttggttccatgctatacatgtctctgggaccaatggtactaagaggtttgataaccctgtcctaccatttaatgatggtgtttattttgcttccactgagaagtctaacataataagaggctggatttttggtactactttagattcgaagacccagtccctacttattgttaataacgctactaatgttgttattaaagtctgtgaatttcaattttgtaatgatccatttttgggtgtttattaccacaaaaacaacaaaagttggatggaaagtgagttcagagtttattctagtgcgaataattgcacttttgaatatgtctctcagccttttcttatggaccttgaaggaaaacagggtaatttcaaaaatcttagggaatttgtgtttaagaatattgatggttattttaaaatatattctaagcacacgcctattaatttagtgcgtgatctccctcagggtttttcggctttagaaccattggtagatttgccaataggtattaacatcactaggtttcaaactttacttgctttacatagaagttatttgactcctggtgattcttcttcaggttggacagctggtgctgcagcttattatgtgggttatcttcaacctaggacttttctattaaaatataatgaaaatggaaccattacagatgctgtagactgtgcacttgaccctctctcagaaacaaagtgtacgttgaaatccttcactgtagaaaaaggaatctatcaaacttctaactttagagtccaaccaacagaatctattgttagatttcctaatattacaaacttgtgcccttttggtgaagtttttaacgccaccagatttgcatctgtttatgcttggaacaggaagagaatcagcaactgtgttgctgattattctgtcctatataattccgcatcattttccacttttaagtgttatggagtgtctcctactaaattaaatgatctctgctttactaatgtctatgcagattcatttgtaattagaggtgatgaagtcagacaaatcgctccagggcaaactggaaagattgctgattataattataaattaccagatgattttacaggctgcgttatagcttggaattctaacaatcttgattctaaggttggtggtaattataattacctgtatagattgtttaggaagtctaatctcaaaccttttgagagagatatttcaactgaaatctatcaggccggtagcacaccttgtaatggtgttgaaggttttaattgttactttcctttacaatcatatggtttccaacccactaatggtgttggttaccaaccatacagagtagtagtactttcttttgaacttctacatgcaccagcaactgtttgtggacctaaaaagtctactaatttggttaaaaacaaatgtgtcaatttcaacttcaatggtttaacaggcacaggtgttcttactgagtctaacaaaaagtttctgcctttccaacaatttggcagagacattgctgacactactgatgctgtccgtgatccacagacacttgagattcttgacattacaccatgttcttttggtggtgtcagtgttataacaccaggaacaaatacttctaaccaggttgctgttctttatcaggatgttaactgcacagaagtccctgttgctattcatgcagatcaacttactcctacttggcgtgtttattctacaggttctaatgtttttcaaacacgtgcaggctgtttaataggggctgaacatgtcaacaactcatatgagtgtgacatacccattggtgcaggtatatgcgctagttatcagactcagactaattctcctcggcgggcacgtagtgtagctagtcaatccatcattgcctacactatgtcacttggtgcagaaaattcagttgcttactctaataactctattgccatacccacaaattttactattagtgttaccacagaaattctaccagtgtctatgaccaagacatcagtagattgtacaatgtacatttgtggtgattcaactgaatgcagcaatcttttgttgcaatatggcagtttttgtacacaattaaaccgtgctttaactggaatagctgttgaacaagacaaaaacacccaagaagtttttgcacaagtcaaacaaatttacaaaacaccaccaattaaagattttggtggttttaatttttcacaaatattaccagatccatcaaaaccaagcaagaggtcatttattgaagatctacttttcaacaaagtgacacttgcagatgctggcttcatcaaacaatatggtgattgccttggtgatattgctgctagagacctcatttgtgcacaaaagtttaacggccttactgttttgccacctttgctcacagatgaaatgattgctcaatacacttctgcactgttagcgggtacaatcacttctggttggacctttggtgcaggtgctgcattacaaataccatttgctatgcaaatggcttataggtttaatggtattggagttacacagaatgttctctatgagaaccaaaaattgattgccaaccaatttaatagtgctattggcaaaattcaagactcactttcttccacagcaagtgcacttggaaaacttcaagatgtggtcaaccaaaatgcacaagctttaaacacgcttgttaaacaacttagctccaattttggtgcaatttcaagtgttttaaatgatatcctttcacgtcttgacaaagttgaggctgaagtgcaaattgataggttgatcacaggcagacttcaaagtttgcagacatatgtgactcaacaattaattagagctgcagaaatcagagcttctgctaatcttgctgctactaaaatgtcagagtgtgtacttggacaatcaaaaagagttgatttttgtggaaagggctatcatcttatgtccttccctcagtcagcacctcatggtgtagtcttcttgcatgtgacttatgtccctgcacaagaaaagaacttcacaactgctcctgccatttgtcatgatggaaaagcacactttcctcgtgaaggtgtctttgtttcaaatggcacacactggtttgtaacacaaaggaatttttatgaaccacaaatcattactacagacaacacatttgtgtctggtaactgtgatgttgtaataggaattgtcaacaacacagtttatgatcctttgcaacctgaattagactcattcaaggaggagttagataaatattttaagaatcatacatcaccagatgttgatttaggtgacatctctggcattaatgcttcagttgtaaacattcaaaaagaaattgaccgcctcaatgaggttgccaagaatttaaatgaatctctcatcgatctccaagaacttggaaagtatgagcagtatataaaatggccatggtacatttggctaggttttatagctggcttgattgccatagtaatggtgacaattatgctttgctgtatgaccagttgctgtagttgtctcaagggctgttgttcttgtggatcctgctgcaaatttgatgaagacgactctgagccagtgctcaaaggagtcaaattacattacacataaacgaacttatggatttgtttatgagaatcttcacaattggaactgtaactttgaagcaaggtgaaatcaaggatgctactccttcagattttgttcgcgctactgcaacgataccgatacaagcctcactccctttcggatggcttattgttggcgttgcacttcttgctgtttttcagagcgcttccaaaatcataaccctcaaaaagagatggcaactagcactctccaagggtgttcactttgtttgcaacttgctgttgttgtttgtaacagtttactcacaccttttgctcgttgctgctggccttgaagccccttttctctatctttatgctttagtctacttcttgcagagtataaactttgtaagaataataatgaggctttggctttgctggaaatgccgttccaaaaacccattactttatgatgccaactattttctttgctggcatactaattgttacgactattgtataccttacaatagtgtaacttcttcaattgtcattacttcaggtgatggcacaacaagtcctatttctgaacatgactaccagattggtggttatactgaaaaatgggaatctggagtaaaagactgtgttgtattacacagttacttcacttcagactattaccagctgtactcaactcaattgagtacagacactggtgttgaacatgttaccttcttcatctacaataaaattgttgatgagcctgaagaacatgtccaaattcacacaatcgacggttcatccggagttgttaatccagtaatggaaccaatttatgatgaaccgacgacgactactagcgtgcctttgtaagcacaagctgatgagtacgaacttatgtactcattcgtttcggaagagacaggtacgttaatagttaatagcgtacttctttttcttgctttcgtggtattcttgctagttacactagccatccttactgcgcttcgattgtgtgcgtactgctgcaatattgttaacgtgagtcttgtaaaaccttctttttacgtttactctcgtgttaaaaatctgaattcttctagagttcctgatcttctggtctaaacgaactaaatattatattagtttttctgtttggaactttaattttagccatggcagattccaacggtactattaccgttgaagagcttaaaaagctccttgaacaatggaacctagtaataggtttcctattccttacatggatttgtcttctacaatttgcctatgccaacaggaataggtttttgtatataattaagttaattttcctctggctgttatggccagtaactttagcttgttttgtgcttgctgctgtttacagaataaattggatcaccggtggaattgctatcgcaatggcttgtcttgtaggcttgatgtggctcagctacttcattgcttctttcagactgtttgcgcgtacgcgttccatgtggtcattcaatccagaaactaacattcttctcaacgtgccactccatggcactattctgaccagaccgcttctagaaagtgaactcgtaatcggagctgtgatccttcgtggacatcttcgtattgctggacaccatctaggacgctgtgacatcaaggacctgcctaaagaaatcactgttgctacatcacgaacgctttcttattacaaattgggagcttcgcagcgtgtagcaggtgactcaggttttgctgcatacagtcgctacaggattggcaactataaattaaacacagaccattccagtagcagtgacaatattgctttgcttgtacagtaagtgacaacagatgtttcatctcgttgactttcaggttactatagcagagatattactaattattatgaggacttttaaagtttccatttggaatcttgattacatcataaacctcataattaaaaatttatctaagtcactaactgagaataaatattctcaattagatgaagagcaaccaatggagattgattaaacgaacatgaaaattattcttttcttggcactgataacactcgctacttgtgagctttatcactaccaagagtgtgttagaggtacaacagtacttttaaaagaaccttgctcttctggaacatacgagggcaattcaccatttcatcctctagctgataacaaatttgcactgacttgctttagcactcaatttgcttttgcttgtcctgacggcgtaaaacacgtctatcagttacgtgccagatcagtttcacctaaactgttcatcagacaagaggaagttcaagaactttactctccaatttttcttattgttgcggcaatagtgtttataacactttgcttcacactcaaaagaaagacagaatgattgaactttcattaattgacttctatttgtgctttttagcctttctgctattccttgttttaattatgcttattatcttttggttctcacttgaactgcaagatcataatgaaacttgtcacgcctaaacgaacatgaaatttcttgttttcttaggaatcatcacaactgtagctgcatttcaccaagaatgtagtttacagtcatgtactcaacatcaaccatatgtagttgatgacccgtgtcctattcacttctattctaaatggtatattagagtaggagctagaaaatcagcacctttaattgaattgtgcgtggatgaggctggttctaaatcacccattcagtacatcgatatcggtaattatacagtttcctgtttaccttttacaattaattgccaggaacctaaattgggtagtcttgtagtgcgttgttcgttctatgaagactttttagagtatcatgacgttcgtgttgttttagatttcatctaaacgaacaaactaaaatgtctgataatggaccccaaaatcagcgaaatgcaccccgcattacgtttggtggaccctcagattcaactggcagtaaccagaatggagaacgcagtggggcgcgatcaaaacaacgtcggccccaaggtttacccaataatactgcgtcttggttcaccgctctcactcaacatggcaaggaagaccttaaattccctcgaggacaaggcgttccaattaacaccaatagcagtccagatgaccaaattggctactaccgaagagctaccagacgaattcgtggtggtgacggtaaaatgaaagatctcagtccaagatggtatttctactacctaggaactgggccagaagctggacttccctatggtgctaacaaagacggcatcatatgggttgcaactgagggagccttgaatacaccaaaagatcacattggcacccgcaatcctgctaacaatgctgcaatcgtgctacaacttcctcaaggaacaacattgccaaaaggcttctacgcagaagggagcagaggcggcagtcaagcctcttctcgttcctcatcacgtagtcgcaacagttcaagaaattcaactccaggcagcagtaggggaacttctcctgctagaatggctggcaatggcggtgatgctgctcttgctttgctgctgcttgacagattgaaccagcttgagagcaaaatgtctggtaaaggccaacaacaacaaggccaaactgtcactaagaaatctgctgctgaggcttctaagaagcctcggcaaaaacgtactgccactaaagcatacaatgtaacacaagctttcggcagacgtggtccagaacaaacccaaggaaattttggggaccaggaactaatcagacaaggaactgattacaaacattggccgcaaattgcacaatttgcccccagcgcttcagcgttcttcggaatgtcgcgcattggcatggaagtcacaccttcgggaacgtggttgacctacacaggtgccatcaaattggatgacaaagatccaaatttcaaagatcaagtcattttgctgaataagcatattgacgcatacaaaacattcccaccaacagagcctaaaaaggacaaaaagaagaaggctgatgaaactcaagccttaccgcagagacagaagaaacagcaaactgtgactcttcttcctgctgcagatttggatgatttctccaaacaattgcaacaatccatgagcagtgctgactcaactcaggcctaaactcatgcagaccacacaaggcagatgggctatataaacgttttcgcttttccgtttacgatatatagtctactcttgtgcagaatgaattctcgtaactacatagcacaagtagatgtagttaactttaatctcacatagcaatctttaatcagtgtgtaacattagggaggacttgaaagagccaccacattttcaccgaggccacgcggagtacgatcgagtgtacagtgaacaatgctagggagagctgcctatatggaagagccctaatgtgtaaaattaattttagtagtgctatccccatgtgattttaatagcttcttaggagaatgacaaaaaaaaaaaaaaaaaaaaaaaaaaaaaaaaa

SEQ ID NO: 2 - protein, 1273 aa, Severe Acute Respiratory Syndrome Coronavirus 2
MFVFLVLLPLVSSQCVNLTTRTQLPPAYTNSFTRGVYYPDKVFRSSVLHSTQDLFLPFFSNVTWFHAIHVSGTNGTKRFDNPVLPFNDGVYFASTEKSNIIRGWIFGTTLDSKTQSLLIVNNATNVVIKVCEFQFCNDPFLGVYYHKNNKSWMESEFRVYSSANNCTFEYVSQPFLMDLEGKQGNFKNLREFVFKNIDGYFKIYSKHTPINLVRDLPQGFSALEPLVDLPIGINITRFQTLLALHRSYLTPGDSSSGWTAGAAAYYVGYLQPRTFLLKYNENGTITDAVDCALDPLSETKCTLKSFTVEKGIYQTSNFRVQPTESIVRFPNITNLCPFGEVFNATRFASVYAWNRKRISNCVADYSVLYNSASFSTFKCYGVSPTKLNDLCFTNVYADSFVIRGDEVRQIAPGQTGKIADYNYKLPDDFTGCVIAWNSNNLDSKVGGNYNYLYRLFRKSNLKPFERDISTEIYQAGSTPCNGVEGFNCYFPLQSYGFQPTNGVGYQPYRVVVLSFELLHAPATVCGPKKSTNLVKNKCVNFNFNGLTGTGVLTESNKKFLPFQQFGRDIADTTDAVRDPQTLEILDITPCSFGGVSVITPGTNTSNQVAVLYQDVNCTEVPVAIHADQLTPTWRVYSTGSNVFQTRAGCLIGAEHVNNSYECDIPIGAGICASYQTQTNSPRRARSVASQSIIAYTMSLGAENSVAYSNNSIAIPTNFTISVTTEILPVSMTKTSVDCTMYICGDSTECSNLLLQYGSFCTQLNRALTGIAVEQDKNTQEVFAQVKQIYKTPPIKDFGGFNFSQILPDPSKPSKRSFIEDLLFNKVTLADAGFIKQYGDCLGDIAARDLICAQKFNGLTVLPPLLTDEMIAQYTSALLAGTITSGWTFGAGAALQIPFAMQMAYRFNGIGVTQNVLYENQKLIANQFNSAIGKIQDSLSSTASALGKLQDVVNQNAQALNTLVKQLSSNFGAISSVLNDILSRLDKVEAEVQIDRLITGRLQSLQTYVTQQLIRAAEIRASANLAATKMSECVLGQSKRVDFCGKGYHLMSFPQSAPHGVVFLHVTYVPAQEKNFTTAPAICHDGKAHFPREGVFVSNGTHWFVTQRNFYEPQIITTDNTFVSGNCDVVIGIVNNTVYDPLQPELDSFKEELDKYFKNHTSPDVDLGDISGINASVVNIQKEIDRLNEVAKNLNESLIDLQELGKYEQYIKWPWYIWLGFIAGLIAIVMVTIMLCCMTSCCSCLKGCCSCGSCCKFDEDDSEPVLKGVKLHYT

SEQ ID NO: 3 - protein, 1121 aa, Severe Acute Respiratory Syndrome Coronavirus 2
AYTNSFTRGVYYPDKVFRSSVLHSTQDLFLPFFSNVTWFHAIHVSGTNGTKRFDNPVLPFNDGVYFASTEKSNIIRGWIFGTTLDSKTQSLLIVNNATNVVIKVCEFQFCNDPFLGVYYHKNNKSWMESEFRVYSSANNCTFEYVSQPFLMDLEGKQGNFKNLREFVFKNIDGYFKIYSKHTPINLVRDLPQGFSALEPLVDLPIGINITRFQTLLALHRSYLTPGDSSSGWTAGAAAYYVGYLQPRTFLLKYNENGTITDAVDCALDPLSETKCTLKSFTVEKGIYQTSNFRVQPTESIVRFPNITNLCPFGEVFNATRFASVYAWNRKRISNCVADYSVLYNSASFSTFKCYGVSPTKLNDLCFTNVYADSFVIRGDEVRQIAPGQTGKIADYNYKLPDDFTGCVIAWNSNNLDSKVGGNYNYLYRLFRKSNLKPFERDISTEIYQAGSTPCNGVEGFNCYFPLQSYGFQPTNGVGYQPYRVVVLSFELLHAPATVCGPKKSTNLVKNKCVNFNFNGLTGTGVLTESNKKFLPFQQFGRDIADTTDAVRDPQTLEILDITPCSFGGVSVITPGTNTSNQVAVLYQDVNCTEVPVAIHADQLTPTWRVYSTGSNVFQTRAGCLIGAEHVNNSYECDIPIGAGICASYQTQTNSPRRARSVASQSIIAYTMSLGAENSVAYSNNSIAIPTNFTISVTTEILPVSMTKTSVDCTMYICGDSTECSNLLLQYGSFCTQLNRALTGIAVEQDKNTQEVFAQVKQIYKTPPIKDFGGFNFSQILPDPSKPSKRSFIEDLLFNKVTLADAGFIKQYGDCLGDIAARDLICAQKFNGLTVLPPLLTDEMIAQYTSALLAGTITSGWTFGAGAALQIPFAMQMAYRFNGIGVTQNVLYENQKLIANQFNSAIGKIQDSLSSTASALGKLQDVVNQNAQALNTLVKQLSSNFGAISSVLNDILSRLDKVEAEVQIDRLITGRLQSLQTYVTQQLIRAAEIRASANLAATKMSECVLGQSKRVDFCGKGYHLMSFPQSAPHGVVFLHVTYVPAQEKNFTTAPAICHDGKAHFPREGVFVSNGTHWFVTQRNFYEPQIITTDNTFVSGNCDVVIGIVNNTVYDPLQPELDS

SEQ ID NO: 4 - protein, 1121 aa, Artificial Sequence
  Synthetic: Mutant Spike (S) protein amino acid sequence
AYTNSFTRGVYYPDKVFRSSVLHSTQDLFLPFFSNVTWFHAIHVSGTNGTKRFDNPVLPFNDGVYFASTEKSNIIRGWIFGTTLDSKTQSLLIVNNATNVVIKVCEFQFCNDPFLGVYYHKNNKSWMESEFRVYSSANNCTFEYVSQPFLMDLEGKQGNFKNLREFVFKNIDGYFKIYSKHTPINLVRDLPQGFSALEPLVDLPIGINITRFQTLLALHRSYLTPGDSSSGWTAGAAAYYVGYLQPRTFLLKYNENGTITDAVDCALDPLSETKCTLKSFTVEKGIYQTSNFRVQPTESIVRFPNITNLCPFGEVFNATRFASVYAWNRKRISNCVADYSVLYNSASFSTFKCYGVSPTKLNDLCFTNVYADSFVIRGDEVRQIAPGQTGKIADYNYKLPDDFTGCVIAWNSNNLDSKVGGNYNYLYRLFRKSNLKPFERDISTEIYQAGSTPCNGVEGFNCYFPLQSYGFQPTNGVGYQPYRVVVLSFELLHAPATVCGPKKSTNLVKNKCVNFNFNGLTGTGVLTESNKKFLPFQQFGRDIADTTDAVRDPQTLEILDITPCSFGGVSVITPGTNTSNQVAVLYQGVNCTEVPVAIHADQLTPTWRVYSTGSNVFQTRAGCLIGAEHVNNSYECDIPIGAGICASYQTQTNSPGSASSVASQSIIAYTMSLGAENSVAYSNNSIAIPTNFTISVTTEILPVSMTKTSVDCTMYICGDSTECSNLLLQYGSFCTQLNRALTGIAVEQDKNTQEVFAQVKQIYKTPPIKDFGGFNFSQILPDPSKPSKRSFIEDLLFNKVTLADAGFIKQYGDCLGDIAARDLICAQKFNGLTVLPPLLTDEMIAQYTSALLAGTITSGWTFGAGAALQIPFAMQMAYRFNGIGVTQNVLYENQKLIANQFNSAIGKIQDSLSSTASALGKLQDVVNQNAQALNTLVKQLSSNFGAISSVLNDILSRLDPPEAEVQIDRLITGRLQSLQTYVTQQLIRAAEIRASANLAATKMSECVLGQSKRVDFCGKGYHLMSFPQSAPHGVVFLHVTYVPAQEKNFTTAPAICHDGKAHFPREGVFVSNGTHWFVTQRNFYEPQIITTDNTFVSGNCDVVIGIVNNTVYDPLQPELDS

SEQ ID NO: 5 - protein, 1121 aa, Artificial Sequence
  Synthetic: (CoV2_S_1_hbnet) mutant Spike (S) protein amino acid sequence
AYTNSFTRGVYYPDKVSMSSVLHSTQDLFLPFFSNVTWFHAIHVSGTNGTKRFDNPVLPFNDGVYFASTEKSNIIRGWIFGTTLDSKTQSLLIVNNATNVVIKVCEFQFCNDPFLGVYYHKNNKSWMESEFRVYSSANNCTFEYVSQPFLMDLEGKQGNFKNLREFVFKNIDGYFKIYSKHTPINLVRDLPQGFSALELLVDLPIGINITRFQTLLALHRSYLTPGDSSSGWTAGAAAYYVGYLQPRTFLLKYNENGVITDAVDCALDPLSETKCTLKSFTVEKGIYITSLFEVQPTESIVRFPNITNLCPFGEVFNATRFASVYAWNRKRISNCVADYSVLYNSASFSTFKCYGVSPTKLNDLCFTNVYADSFVIRGDEVRQIAPGQTGKIADYNYKLPDDFTGCVIAWNSNNLDSKVGGNYNYLYRLFRKSNLKPFERDISTEIYQAGSTPCNGVEGFNCYFPLQSYGFQPTNGVGYQPYRVVVLSFELNHAPATVCGPKKSTNLVKNKCVNFNFNGLTGTGVLTESNLKFVSTQLFRVHSANTTLAVRDPQTLEILDIVSCSSGAVSVITPGTNTSNQVAVLYYNVWCTEVPVAIHADQLTPTWRVYSTGSNVFQTKAGCLIGAEHVNNSYECDIAIGGGICASYQTQTNSPGSASSVASQSIIAYWISTGSWNSVDNSNDAIAIATNFTISVTTEILPVSMTKTWVICTLYICGGSTECSNLLAQYGSFCTELNRALTGIAVEQDKNTWEVFAQVRTIFHTPSIKDFGGFNFSQILPDPSKPSKRSFIEDLLFNKVTLADAGFIKQYGDCLGDIAARDLSCHQDSRGLNILSSLLTDELIAEFTSALLAGTITAGWSFTAGHALNIPWAVQMAWRFAGIGVTENVLAKNQKLIANQFNSAIGKIQDSLSSTASALGKLQDVVNQNAQALDELERELSSNFGAISSVLNDILSNLDPPEAEVQIDRLILGRLMALAAFVTAQLIRAAEIRASANLAATKMAECVAGQSKLVGFCGEGWHLMSFPQSAPHGVVFLHVTLVAGQTKNFTTALAICHDGKAHIPRNGVFVSNGTHWFVTQEQFYEPLIITTDLVLVSGNCDDVIGIVNNTVYDPKQPELDS

SEQ ID NO: 6 - protein, 1121 aa, Artificial Sequence
  Synthetic: (CoV2_S_2_hbnet) mutant Spike (S) protein amino acid sequence
AYTNSFTRGVYYPDKVSMSSVLHSTQDLFLPFFSNVTWFHAIHVSGTNGTKRFDNPVLPFNDGVYFASTEKSNIIRGWIFGTTLDSKTQSLLIVNNATNVVIKVCEFQFCNDPFLGVYYHKNNKSWMESEFRVYSSANNCTFEYVSQPFLMDLEGKQGNFKNLREFVFKNIDGYFKIYSKHTPINLVRDLPQGFSALVLLVDLPIGINITRFQTLLALHRSYLTPGDSSSGWTAGAAAYYVGYLQPRTFLLKYNENGVITDAVDCALDPLSETKCTLKSFTVEKGIYITSLFKVQPTESIVRFPNITNLCPFGEVFNATRFASVYAWNRKRISNCVADYSVLYNSASFSTFKCYGVSPTKLNDLCFTNVYADSFVIRGDEVRQIAPGQTGKIADYNYKLPDDFTGCVIAWNSNNLDSKVGGNYNYLYRLFRKSNLKPFERDISTEIYQAGSTPCNGVEGFNCYFPLQSYGFQPTNGVGYQPYRVVVLSFELNHAPATVCGPKKSTNLVKNKCVNFNFNGLTGTGVLTESNLKFLEFQLFHVHSANTTLAVRDPQTLEILDIVSCSSGAVSVITPGTNTSNQVAVLYYNVWCTEVPVAIHADQLTPTWRVYSTGSNVFQTRAGCLIGAEHVNNSYECDIAIGAGICASYQTQTNSPGSASSVASQSIIAYQISTGSWNSVDNSNDAIAIATNFTISVTTEILPVSMTKTWVICTLYICGGSTECSNLLAQHGSFCTELNRALTGIAVEQDKNTWEVFATVRTIFHTPSIKDFGGFNFSQILPDPSKPSKRSFIEDLLFNKVTLADAGFIKQYGDCLGDIAARDLSCHQDSHGLNILSSLLTDELIAEFTSALLAGTITAGHTFTAGHASNIPWWAQMAWRFAGIGVTENVLAKNQKLIANQFNSAIGKIQDSLSSTASALGKLQDVVNQNAQALDELERELSSNFGAISSVLNDILSNLDPPEAEVQIDRLILGRLLALAAFVTAQLIRAAEIRASANLAATKMRECVAGQSKLVGFCGEGWHLMSFPQSAPHGVVFLHVTLVAGQTKNFTTAPAICHDGKAHIPRTGVFVSNGTHWFVTQENFYEPQIITTDNVFVSGNCDDVIGIVNNTVYDPLQPELDS

SEQ ID NO: 7 - protein, 1121 aa, Artificial Sequence
  Synthetic: (CoV2_S_3_hbnet) mutant Spike (S) protein amino acid sequence
AYTNSFTRGVYYPDKVSMSSVLHSTQDLFLPFFSNVTWFHAIHVSGTNGTKRFDNPVLPFNDGVYFASTEKSNIIRGWIFGTTLDSKTQSLLIVNNATNVVIKVCEFQFCNDPFLGVYYHKNNKSWMESEFRVYSSANNCTFEYVSQPFLMDLEGKQGNFKNLREFVFKNIDGYFKIYSKHTPINLVRDLPQGFSALELLVDLPIGINITRFQTLLALHRSYLTPGDSSSGWTAGAAAYYVGYLQPRTFLLKYNENGVITDAVDCALDPLSETKCTLKSFTVEKGIYDTSTFEVQPTESIVRFPNITNLCPFGEVFNATRFASVYAWNRKRISNCVADYSVLYNSASFSTFKCYGVSPTKLNDLCFTNVYADSFVIRGDEVRQIAPGQTGKIADYNYKLPDDFTGCVIAWNSNNLDSKVGGNYNYLYRLFRKSNLKPFERDISTEIYQAGSTPCNGVEGFNCYFPLQSYGFQPTNGVGYQPYRVVVLSFELNHAPATVCGPKKSTNLVKNKCVNFNFNGLTGTGVLTESNLKFVSTQLFRVHSANTTLAVRDPQTLEILDIVSCSSGRVSVITPGTNTSNQVAVLYRNVWCTEVPVAIHADQLTPTWRVYSTGSNVFQTKAGCLIGAEHVNNSYECDIYIGGGICASYQTQTNSPGSASSVASQSIIAYWISTGSWNSVENSNDAIAIATNFTISVTTEILPVSMTKTHVDCTLYICGGSTECSNLLAQYGSFCTELNRMLTGIAVEQDKNTWEVFATVRTIFHTPSIKDFGGFNFSQILPDPSKPSKRSFIEDLLFNKVTLADAGFIKQYGDCLGDIAARDLSCHQDSRGLNILSSLLTDELIAEFTSALLAGTITAGWSFTAGAALNIPWWAQMAWRFAGIGVTENVLAKNQKLIANQFNSAIGKIQDSLSSTASALGKLQDVVNQNAQALDELERELSSNFGAISSVLNDILSNLDPPEAEVQIDRLILGRLMALAAFVTAQAIRAAEIRASANLAALKMRICVAGQSKLVGFCGEGWHLMSFPQSAPHGVVFLHVTLVAGQYKNFTTAPAICHDGKAHIPSTGVFVSNGTHWFVTQEQFYEPQIITTDLVIVSGNCDDVIGIVNNTVYDPLQPELDS

SEQ ID NO: 8 - protein, 1121 aa, Artificial Sequence
  Synthetic: (CoV2_S_4_hbnet) mutant Spike (S) protein amino acid sequence
AYTNSFTRGVYYPDKVSMSSVLHSTQDLFLPFFSNVTWFHAIHVSGTNGTKRFDNPVLPFNDGVYFASTEKSNIIRGWIFGTTLDSKTQSLLIVNNATNVVIKVCEFQFCNDPFLGVYYHKNNKSWMESEFRVYSSANNCTFEYVSQPFLMDLEGKQGNFKNLREFVFKNIDGYFKIYSKHTPINLVRDLPQGFSALELLVDLPIGINITRFQTLLALHRSYLTPGDSSSGWTAGAAAYYVGYLQPRTFLLKYNENGVITDAVDCALDPLSETKCTLKSFTVEKGIYDTSTFKVQPTESIVRFPNITNLCPFGEVFNATRFASVYAWNRKRISNCVADYSVLYNSASFSTFKCYGVSPTKLNDLCFTNVYADSFVIRGDEVRQIAPGQTGKIADYNYKLPDDFTGCVIAWNSNNLDSKVGGNYNYLYRLFRKSNLKPFERDISTEIYQAGSTPCNGVEGFNCYFPLQSYGFQPTNGVGYQPYRVVVLSFELNHAPATVCGPKKSTNLVKNKCVNFNFNGLTGTGVLTESNLKFVSTQLFRVHSANTTLAVRDPQTLEILDIVSCSSGRVSVITPGTNTSNQVAVLYRNVWCTEVPVAIHADQLTPTWRVYSTGSNVFQTRAGCLIGAEHVNNSYECDIAIGAGICASYQTQTNSPGSASSVASQSIIAYQISTGSWNSVDNSNDAIAVATNFTISVTTEILPVSMTKTHVDCTLYICGGSTECSNLLAQHGSFCTELNRMLTGIAVEQDKNTWEVFATVRTIFHTPSIKDFGGFNFSQILPDPSKPSKRSFIEDLLFNKVTLADAGFIKQYGDCLGDIAARDLSCHQDSHGLNILSSLLTDELIAEFTSALLAGTITAGTTFLAGHACNIPWWAQMAWRFAGIGVTENVLAKNQKLIANQFNSAIGKIQDSLSSTASALGKLQDVVNQNAQALAELERELSSNFGAISSVLNDILSNLDPPEAEVQIDRLILGRLLALAAFVTAQAIRAAEIRASANLAATKMRECVAGQSKLWGFCGEGWHLMSFPQSAPHGVVFLHVTLVAGQTKNFTTAPAICHDGKAHIPRNGVFVSNGTHWFVTQEEFYEPLIITTDLVLVSGNCDDVIGIVNNTVYDPLQPELDS

SEQ ID NO: 9 - protein, 1121 aa, Artificial Sequence
  Synthetic: (CoV2_S_5_hbnet) mutant Spike (S) protein amino acid sequence
AYTNSFTRGVYYPDKVSMSSVLHSTQDLFLPFFSNVTWFHAIHVSGTNGTKRFDNPVLPFNDGVYFASTEKSNIIRGWIFGTTLDSKTQSLLIVNNATNVVIKVCEFQFCNDPFLGVYYHKNNKSWMESEFRVYSSANNCTFEYVSQPFLMDLEGKQGNFKNLREFVFKNIDGYFKIYSKHTPINLVRDLPQGFSALELLVDLPIGINITRFQTLLALHRSYLTPGDSSSGWTAGAAAYYVGYLQPRTFLLKYNENGVITDAVDCALDPLSETKCTLKSFTVEKGIYITSLFKVQPTESIVRFPNITNLCPFGEVFNATRFASVYAWNRKRISNCVADYSVLYNSASFSTFKCYGVSPTKLNDLCFTNVYADSFVIRGDEVRQIAPGQTGKIADYNYKLPDDFTGCVIAWNSNNLDSKVGGNYNYLYRLFRKSNLKPFERDISTEIYQAGSTPCNGVEGFNCYFPLQSYGFQPTNGVGYQPYRVVVLSFELNHAPATVCGPKKSTNLVKNKCVNFNFNGLTGTGVLTESNLKFVSTQLFMVHSANTTLGVRDPQTLEILDIVSCSSGAVSVITPGTNTSNQVAVLYYNVWCTEVPVAIHADQLTPTWRVYSTGSNVFQTRAGCLIGAEHVNNSYECDIYIGAGICASYQTQTNSPGSASSVASQSIIAYQISTGSWNSVDNSNDAIAIATNFTISVTTEILPVSMTKTWVICTLYICGGSTECSNLLAQHGSFCTELNRALTGIAVEQDKNTWEVFATVRTIFHTPSIKDFGGFNFSQILPDPSKPSKRSFIEDLLFNKVTLADAGFIKQYGDCLGDIAARDLSCHQDSHGLNILSSLLTDELIAEFTSALLAGTITAGWSFLAGAALNIPWWAQMAWRFKGIGVTEWVLAINQKLIANQFNSAIGKIQDSLSSTASALGKLQDVVNQNAQALDELERELSSNFGAISSVLNDILSNLDPPEAEVQIDRLILGRLLALQAFVTAQLIRAAEIRASANLAATKMRECVAGQSKLWGFCGEGWHLMSFPQSAPHGVVFLHVTLVAGQLKNFTTAPAICHDGKAHVPRIGVFVSNGTHWFVTQEQFYFPLIITTDLVLVSGNCDDVIGIVNNTVYDPLQPELDS

SEQ ID NO: 10 - protein, 1121 aa, Artificial Sequence
  Synthetic: (CoV2_S2_1_hbnet) mutant Spike (S) protein amino acid sequence
AYTNSFTRGVYYPDKVFRSSVLHSTQDLFLPFFSNVTWFHAIHVSGTNGTKRFDNPVLPFNDGVYFASTEKSNIIRGWIFGTTLDSKTQSLLIVNNATNVVIKVCEFQFCNDPFLGVYYHKNNKSWMESEFRVYSSANNCTFEYVSQPFLMDLEGKQGNFKNLREFVFKNIDGYFKIYSKHTPINLVRDLPQGFSALEPLVDLPIGINITRFQTLLALHRSYLTPGDSSSGWTAGAAAYYVGYLQPRTFLLKYNENGTITDAVDCALDPLSETKCTLKSFTVEKGIYQTSNFRVQPTESIVRFPNITNLCPFGEVFNATRFASVYAWNRKRISNCVADYSVLYNSASFSTFKCYGVSPTKLNDLCFTNVYADSFVIRGDEVRQIAPGQTGKIADYNYKLPDDFTGCVIAWNSNNLDSKVGGNYNYLYRLFRKSNLKPFERDISTEIYQAGSTPCNGVEGFNCYFPLQSYGFQPTNGVGYQPYRVVVLSFELLHAPATVCGPKKSTNLVKNKCVNFNFNGLTGTGVLTESNKKFLPFQQFGRDIADTTDAVRDPQTLEILDITPCSFGGVSVITPGTNTSNQVAVLYQGVNCTEVPVAIHADQLTPTWRVYSTGSNVFQTRAGCLIGAEHVNNSYECDIPIGAGICASYQTQTNSPGSASSVASQSIIAYQISTGSWNSVENSNDAIAIATNFTISVTTEILPVSMTKTWVDCTLYICGGSTECSNLLAQYGSFCTELNRMLTGIAVEQDKNTWEVFATVRTIFHTPSIKDFGGFNFSQILPDPSKPSKRSFIEDLLFNKVTLADAGFIKQYGDCLGDIAARDSSCAQKANGLNILSSLLTDELIAEFTSALLAGTITAGWSFTAGAALNIPWWAQMAWRFAGIGVTENVLAKNQKLIANQFNSAIGKIQDSLSSTASALGKLQDVVNQNAQALAELEKELSSNFGAISSVLNDILSNLDPPEAEVQIDRLILGRLMALAAFVTAQAIRAAEIRASANLAATKMRECVAGQSKLVGFCGEGWHLMSFPQSAPHGVVFLHVTLVAGQYKNFTTAPAICHDGKAHIPRNGVFVSNGTHWFVTQEQFYEPLIITTDLVLVSGNCDDVIGIVNNTVYDPKQPELDS

SEQ ID NO: 11 - protein, 1121 aa, Artificial Sequence
  Synthetic: (CoV2_S2_2_hbnet) mutant Spike (S) protein amino acid sequence
AYTNSFTRGVYYPDKVFRSSVLHSTQDLFLPFFSNVTWFHAIHVSGTNGTKRFDNPVLPFNDGVYFASTEKSNIIRGWIFGTTLDSKTQSLLIVNNATNVVIKVCEFQFCNDPFLGVYYHKNNKSWMESEFRVYSSANNCTFEYVSQPFLMDLEGKQGNFKNLREFVFKNIDGYFKIYSKHTPINLVRDLPQGFSALEPLVDLPIGINITRFQTLLALHRSYLTPGDSSSGWTAGAAAYYVGYLQPRTFLLKYNENGTITDAVDCALDPLSETKCTLKSFTVEKGIYQTSNFRVQPTESIVRFPNITNLCPFGEVFNATRFASVYAWNRKRISNCVADYSVLYNSASFSTFKCYGVSPTKLNDLCFTNVYADSFVIRGDEVRQIAPGQTGKIADYNYKLPDDFTGCVIAWNSNNLDSKVGGNYNYLYRLFRKSNLKPFERDISTEIYQAGSTPCNGVEGFNCYFPLQSYGFQPTNGVGYQPYRVVVLSFELLHAPATVCGPKKSTNLVKNKCVNFNFNGLTGTGVLTESNKKFLPFQQFGRDIADTTDAVRDPQTLEILDITPCSFGGVSVITPGTNTSNQVAVLYQGVNCTEVPVAIHADQLTPTWRVYSTGSNVFQTRAGCLIGAEHVNNSYECDIPIGAGICASYQTQTNSPGSASSVASQSIIAYQISTGSWNSVDNSNDAIAVATNFTISVTTEILPVSMTKTWVDCTLYICGGSTECSNLLAQHGSFCTELNRALTGIAVEQDKNTWEVFATVRTIFHTPSIKDFGGFNFSQILPDPSKPSKRSFIEDLLFNKVTLADAGFIKQYGDCLGDIAARDSSCAQKANGLNILSHLLTDELIAEFTSALLAGTITAGTTFLAGHACNIPWWAQMAQRFAGIGVTENVLAKNQKLIANQFNSAIGKIQDSLSSTASALGKLQDVVNQNAQALAELEKELSSNFGAISSVLNDILSHLDPPEAEVQIDRLILGRLLALQAFVTAQLIRAAEIRASANLAATKMRECVAGQSKLWGFCGEGFHLMSFPQSAPHGVVFLHVTYVAGQTKNFTTAPAICHDGKAHIPRNGTFVSNGTHWFVTQDNFYEPLIITTDLVLVSGNCDDVIGIVNNTVYDPLQPELDS

SEQ ID NO: 12 - protein, 1121 aa, Artificial Sequence
  Synthetic: (CoV2_S2_3_hbnet) mutant Spike (S) protein amino acid sequence
AYTNSFTRGVYYPDKVFRSSVLHSTQDLFLPFFSNVTWFHAIHVSGTNGTKRFDNPVLPFNDGVYFASTEKSNIIRGWIFGTTLDSKTQSLLIVNNATNVVIKVCEFQFCNDPFLGVYYHKNNKSWMESEFRVYSSANNCTFEYVSQPFLMDLEGKQGNFKNLREFVFKNIDGYFKIYSKHTPINLVRDLPQGFSALEPLVDLPIGINITRFQTLLALHRSYLTPGDSSSGWTAGAAAYYVGYLQPRTFLLKYNENGTITDAVDCALDPLSETKCTLKSFTVEKGIYQTSNFRVQPTESIVRFPNITNLCPFGEVFNATRFASVYAWNRKRISNCVADYSVLYNSASFSTFKCYGVSPTKLNDLCFTNVYADSFVIRGDEVRQIAPGQTGKIADYNYKLPDDFTGCVIAWNSNNLDSKVGGNYNYLYRLFRKSNLKPFERDISTEIYQAGSTPCNGVEGFNCYFPLQSYGFQPTNGVGYQPYRVVVLSFELLHAPATVCGPKKSTNLVKNKCVNFNFNGLTGTGVLTESNKKFLPFQQFGRDIADTTDAVRDPQTLEILDITPCSFGGVSVITPGTNTSNQVAVLYQGVNCTEVPVAIHADQLTPTWRVYSTGSNVFQTRAGCLIGAEHVNNSYECDIPIGAGICASYQTQTNSPGSASSVASQSIIAYQISTGSWNSVDNSNDAIAIATNFTISVTTEILPVSMTKTWVDCTLYICGGSTECSNLLAQYGSFCTELNRMLTGIAVEQDKNTWEVFATVRTIFHTPSIKDFGGFNFSQILPDPSKPSKRSFIEDLLFNKVTLADAGFIKQYGDCLGDIAARDSSCAQKANGLNILSSLLTDELIAEFTSALLAGTITAGSTFIAGHALNIPWWAQMAWRFAGIGVTENVLAKNQKLIANQFNSAIGKIQDSLSSTASALGKLQDVVNQNAQALAELEKELSSNFGAISSVLNDILSNLDPPEAEVQIDRLILGRLMALAAFVTAQAIRAAEIRASANLAATKMRECVNGQSKLHGFCGEGWHLMSFPQSAPHGVVFLHVTLVAGQSKNFTTAPAICHDGKAHIPRNGTFVSNGTHWFVTQWEFYEPLIITTDLVLVSGNCDDVIGIVNNTVYDPLQPELDS

SEQ ID NO: 13 - protein, 1121 aa, Artificial Sequence
  Synthetic: (CoV2_S2_4_hbnet) mutant Spike (S) protein amino acid sequence
AYTNSFTRGVYYPDKVFRSSVLHSTQDLFLPFFSNVTWFHAIHVSGTNGTKRFDNPVLPFNDGVYFASTEKSNIIRGWIFGTTLDSKTQSLLIVNNATNVVIKVCEFQFCNDPFLGVYYHKNNKSWMESEFRVYSSANNCTFEYVSQPFLMDLEGKQGNFKNLREFVFKNIDGYFKIYSKHTPINLVRDLPQGFSALEPLVDLPIGINITRFQTLLALHRSYLTPGDSSSGWTAGAAAYYVGYLQPRTFLLKYNENGTITDAVDCALDPLSETKCTLKSFTVEKGIYQTSNFRVQPTESIVRFPNITNLCPFGEVFNATRFASVYAWNRKRISNCVADYSVLYNSASFSTFKCYGVSPTKLNDLCFTNVYADSFVIRGDEVRQIAPGQTGKIADYNYKLPDDFTGCVIAWNSNNLDSKVGGNYNYLYRLFRKSNLKPFERDISTEIYQAGSTPCNGVEGFNCYFPLQSYGFQPTNGVGYQPYRVVVLSFELLHAPATVCGPKKSTNLVKNKCVNFNFNGLTGTGVLTESNKKFLPFQQFGRDIADTTDAVRDPQTLEILDITPCSFGGVSVITPGTNTSNQVAVLYQGVNCTEVPVAIHADQLTPTWRVYSTGSNVFQTRAGCLIGAEHVNNSYECDIPIGAGICASYQTQTNSPGSASSVASQSIIAYQISTGSWNSVDNSNDAIAIATNFTISVTTEILPVSMTKTWVDCTLYICGGSTECSNLLAQYGSFCTELNRMLTGIAVEQDKNTWEVFATVRTIFHTPSIKDFGGFNFSQILPDPSKPSKRSFIEDLLFNKVTLADAGFIKQYGDCLGDIAARDSSCAQKANGLNILSHLLTDELIAEFTSALLAGTITAGWSFLAGHALNIPWAEQMAWRFAGIGVTENVLAKNQKLIANQFNSAIGKIQDSLSSTASALGKLQDVVNQNAQALAELEKELSSNFGAISSVLNDILSNLDPPEAEVQIDRLILGRLMALAAFVTAQAIRAAEIRASANLAATKMRECVAGQSKLWGFCGEGWHLMSFPQSAPHGVVFLHVTLVAGQSKNFTTALAICHDGKAHIPRNGVFVSNGTHWFVTQEQFYEPLIITTDLVLVSGNCDDVIGIVNNTVYDPLQPELDS

SEQ ID NO: 14 - protein, 1121 aa, Artificial Sequence
  Synthetic: (CoV2_S2_5_hbnet) mutant Spike (S) protein amino acid sequence
AYTNSFTRGVYYPDKVFRSSVLHSTQDLFLPFFSNVTWFHAIHVSGTNGTKRFDNPVLPFNDGVYFASTEKSNIIRGWIFGTTLDSKTQSLLIVNNATNVVIKVCEFQFCNDPFLGVYYHKNNKSWMESEFRVYSSANNCTFEYVSQPFLMDLEGKQGNFKNLREFVFKNIDGYFKIYSKHTPINLVRDLPQGFSALEPLVDLPIGINITRFQTLLALHRSYLTPGDSSSGWTAGAAAYYVGYLQPRTFLLKYNENGTITDAVDCALDPLSETKCTLKSFTVEKGIYQTSNFRVQPTESIVRFPNITNLCPFGEVFNATRFASVYAWNRKRISNCVADYSVLYNSASFSTFKCYGVSPTKLNDLCFTNVYADSFVIRGDEVRQIAPGQTGKIADYNYKLPDDFTGCVIAWNSNNLDSKVGGNYNYLYRLFRKSNLKPFERDISTEIYQAGSTPCNGVEGFNCYFPLQSYGFQPTNGVGYQPYRVVVLSFELLHAPATVCGPKKSTNLVKNKCVNFNFNGLTGTGVLTESNKKFLPFQQFGRDIADTTDAVRDPQTLEILDITPCSFGGVSVITPGTNTSNQVAVLYQGVNCTEVPVAIHADQLTPTWRVYSTGSNVFQTRAGCLIGAEHVNNSYECDIPIGAGICASYQTQTNSPGSASSVASQSIIAYQISTGSWNSVDNSNDAIAIATNFTISVTTEILPVSMTKTWVDCTLYICGGSTECSNLLAQYGSFCTELNRMLTGIAVEQDKNTWEVFATVRTIFHTPSIKDFGGFNFSQILPDPSKPSKRSFIEDLLFNKVTLADAGFIKQYGDCLGDIAARDSSCAQKANGLNILSSLLTDELIAEFTSALLAGTITAGWTFLAGAALNIPWAVQMAWRFAGIGVTENVLAKNQKLIANQFNSAIGKIQDSLSSTASALGKLQDVVNQNAQALAQLEKTLSSNFGAISSVLNDILSNLDPPEAEVQIDRLILGRLMALAAFVTAQAIRAAEIRASANLAATKMRECVAGQSKLWGFCGEGFHLMSFPQSAPHGVVFLHVTYVAGQYKNFTTALAICHDGKAHIPRNGVFVSNGTHWFVTQENFYEPLIITTDLVLVSGNCDDVIGIVNNTVYDPLQPELDS

SEQ ID NO: 15 - protein, 1121 aa, Artificial Sequence
  Synthetic: (CoV2_S_1_pross) mutant Spike (S) protein amino acid sequence
AYTNSFRRGVYYPDKVFRSNVLHLTQDLFLPFFSNVTWFHAINVSGTNGTKRFDNPVLPFNDGVYFAATEKSNIIRGWIFGSTLDSKTQTLLIVNNGTNVVIRVCEFNFCEDPFLGVYYHKNNKSWLESGFHVYDSANNCTFEYVSHPFIMDLEGDSGNFKHLREFIFKNIDGWFHIYSSHTPINLVTDLPAGFSALELLVDLPIGINITRFQILLALHRSYLTPGDSRSGWTRGAAVYYVGYLQPRTFLLKYNENGTITDAVDCALDPLAETKCTLKSFTVEKGIYQTSNFRVRPTESIVRFPNITNLCDFSEVFNATRFASVYAWNRKRISNCVADYSSLYNSTSFSTFHCYGVDPKKLNDLCFTNVYADSFVIRGDEVRQLAPGQTGEIADYNYKLPDDFTGCVIAWNSNNLDARKSGNYNYLYRLFRNGNLRPFERDISTEIYQLGDTPCNGVEGFNCYFPLQSYDFQPTNGSEYQPYRVVVLSFELLHGPATVCGPKKNTSLVKNKCVNFNFYGYTGTGVLTESNKKFLSFQLFGRDSSDTTDAVRDPQTNEIYDITPCSFGGVSVITPGTDTSNEVAVLYQNVNCSEVPVAIHANQLTPTWRRYSTGSNIFQTRAGCLIGAEFVNNSYECDIPIGAGICASYDTQTNSPGSASSVASQSIIAYTMSLGSENSVSYSNDSIAIPTNFTISVTTEIIPVSMPKVSVDCKMYICGDHSECSNLLLQYGSFCTQLNRALHEIAEEQDKNMLEVFAQVRQIYKTPPIKDFGGFNFSLILPDPSKSSKRSAIEDLLFNKVKLADAGFIEGYGDCLGDIAARDLICAQKFNGLTVLPPLLTDEMIAAYTAALLAGTITAGWTFGAGSALQIPFAMQMAYRFNGIGVTQNVLYENQKLIANQFNKAIGAIQEGLDETAEALGKLQDVVNQNAQALNTLVKQLSSNFGAISSSLNDILSRLDPPEAEVQIDRLINGRLQALNTFVTQLLIRAAEIRASAELAAEKMNECVLGQSKRVNFCGNGYHLMSFPQAAPHGVVFLHVTYVPTSHRNFTTAPAICHNGKAHFPRDGVFVSNGTHWFVTQRNFYEPQPITTDNTFVSGDCDVVIGIVNNTVYDPLQPELDS

SEQ ID NO: 16 - protein, 1121 aa, Artificial Sequence
  Synthetic: (CoV2_S_2_pross) mutant Spike (S) protein amino acid sequence
AYTNSFTRGVYYPDKVFRSNVLHLTQDLFLPFFSNVTWFHAINVSGTNGTKRFDNPVLPFNDGVYFASTEKSNIIRGWIFGTTLDSKTQSLLIVNNGTNVVIRVCEFNFCENPFLGVYYHKNNKSWMESGFHVYTSANNCTFEYVSHPFIMDLEGDSGNFKHLREFIFKNIDGWFHIYSKHTPINLVTDLPAGFSALELLVDLPIGINITRFQILLALHRSYLTPGDSRSGWTRGAAVYYVGYLQPRTFLLKYNENGTITDAVDCALDPLAETKCTLKSFTVEKGIYQTSNFRVQPTESIVRFPNITNLCDFSEVFNATRFASVYAWNRKRISNCVADYSSLYNSTSFSTFKCYGVDPTKLNDLCFTNVYADSFVIRGDEVRQLAPGQTGEIADYNYKLPDDFTGCVIAWNSNNLDARKSGNYNYLYRLFRHGNLRPFERDISTEIYQAGDTPCNGVEGFNCYFPLQSYDFQPTNGSSYQPYRVVVLSFELLHGPATVCGPKKNTSLVKNKCVNFNFYGYTGTGVLTESNKKFLSFQLFGRDSADTTDAVRDPQTNEIYDITPCSFGGVSVITPGTNTSNQVAVLYQNVNCTEVPVAIHANQLTPTWRRYSTGSNIFQTRAGCLIGAEYVNNSYECDIPIGAGICASYDTQTNSPGSASSVASQSIIAYTMSLGSENSVSYSNDSIAIPTNFTISVTTEIIPVSMQKVSVDCKMYICGDHSECSNLLLQYGSFCTQLNRALHEIAEEQDKNTLEVFAQVKQIYKTPPIKDFGGFNFSLILPDPSKSSKRSAIEDLLFNKVKLADAGFIEGYGDCLGDIAARDLICAQKFNGLTVLPPLLTDEMIAAYTAALLAGTITAGWTFGAGSALQIPFAMQMAYRFNGIGVTQNVLYENQKLIANQFNKAIGAIQEGLDATAEALGKLQDVVNQNAQALNTLVKQLSSNFGAISSVLNDILSRLDPPEAEVQIDRLINGRLQALNTFVTQLLIRAAEIRASAELAAEKMSECVLGQSKRVDFCGNGYHLMSFPQAAPHGVVFLHVTYVPTDYRNFTTAPAICHNGKAHFPREGVFVSNGTHWFVTQRNFYEPQIITTDNTFVSGDCDVVIGIVNNTVYDPLQPELDS

SEQ ID NO: 17 - protein, 1121 aa, Artificial Sequence
  Synthetic: (CoV2_S_3_5_pross) mutant Spike (S) protein amino acid sequence
AYTNSFTRGVYYPDKVFRSNVLHLTQDLFLPFFSNVTWFHAIHVSGTNGTKRFDNPVLPFNDGVYFASTEKSNIIRGWIFGTTLDSKTQSLLIVNNGTNVVIRVCEFQFCEDPFLGVYYHKNNKSWMESGFHVYSSANNCTFEYVSQPFLMDLEGDSGNFKNLREFIFKNIDGWFHIYSKHTPINLVRDLPEGFSALEPLVDLPIGINITRFQILLALHRSYLTPGDSRSGWTRGAAAYYVGYLQPRTFLLKYNENGTITDAVDCALDPLSETKCTLKSFTVEKGIYQTSNFRVQPTESIVRFPNITNLCDFDEVFNATRFASVYAWNRKRISNCVADYSVLYNSTSFSTFWCYGVSPTKLNDLCFTNVYADSFVIRGDEVRQLAPGQTGEIADYNYKLPDDFTGCVIAWNSNNLDARVSGNYNYLYRLFRKGNLRPFERDISTEIYQAGSTPCNGVEGFNCYFPLQSYDFQPTNGSHYQPYRVVVLSFELLHGPATVCGPKKNTNLVKNKCVNFNFYGYTGTGVLTESNKKFLSFQQFGRDSADTTDAVRDPQTNEIYDITPCSFGGVSVITPGTNTSNQVAVLYQGVNCTEVPVAIHADQLTPTWRRYSTGSNVFQTRAGCLIGAEYVNNSYECDIPIGAGICASYDTQTNSPGSASSVASQSIIAYTMSLGEENSVSYSNNSIAIPTNFTISVTTEIIPVSMQKVSVDCTMYICGDHEECSNLLLQYGSFCTQLNRALHEIAVEQDKNTQEVFAQVKQIYKTPPIKDFGGFNFSQILPDPSKSSKRSAIEDLLFNKVTLADAGFIKGYGDCLGDIAARDLICAQKFNGLTVLPPLLTDEMIAAYTSALLAGTITAGWTFGAGAALQIPFAMQMAYRFNGIGVTQNVLYENQKLIANQFNKAIGAIQDGLDSTASALGKLQDVVNQNAQALNTLVKQLSSNFGAISSVLNDILSRLDPPEAEVQIDRLINGRLQALNTYVTQQLIRAAEIRASANLAAEKMSECVLGQSKRVDFCGKGYHLMSFPQAAPHGVVFLHVTYVPTQHKNFTTAPAICHNGKAHFPREGVFVSNGTHWFVTQRNFYEPQPITTDNTFVSGDCDVVIGIVNNTVYDPLQPELDS

SEQ ID NO: 18 - protein, 1121 aa, Artificial Sequence
  Synthetic: (CoV2_S_5_pross) mutant Spike (S) protein amino acid sequence
AYTNSFTRGVYYPDKVFRSNVLHLTQDLFLPFFSNVTWFHAIHVSGTNGTKRFDNPVLPFNDGVYFASTEKSNIIRGWIFGTTLDSKTQSLLIVNNATNVVIKVCEFQFCEDPFLGVYYHKNNKSWMESEFHVYSSANNCTFEYVSQPFLMDLEGKQGNFKNLREFVFKNIDGYFKIYSKHTPINLVRDLPEGFSALEPLVDLPIGINITRFQILLALHRSYLTPGDSRSGWTAGAAAYYVGYLQPRTFLLKYNENGTITDAVDCALDPLSETKCTLKSFTVEKGIYQTSNFRVQPTESIVRFPNITNLCDFDEVFNATRFASVYAWNRKRISNCVADYSVLYNSTSFSTFKCYGVSPTKLNDLCFTNVYADSFVIRGDEVRQLAPGQTGEIADYNYKLPDDFTGCVIAWNSNNLDARVSGNYNYLYRLFRKGNLKPFERDISTEIYQAGSTPCNGVEGFNCYFPLQSYNFQPTNGSGYQPYRVVVLSFELLHGPATVCGPKKNTNLVKNKCVNFNFNGYTGTGVLTESNKKFLSFQQFGRDSADTTDAVRDPQTNEILDITPCSFGGVSVITPGTNTSNQVAVLYQNVNCTEVPVAIHADQLTPTWRRYSTGSNVFQTRAGCLIGAEHVNNSYECDIPIGAGICASYDTQTNSPGSASSVASQSIIAYTMSLGAENSVAYSNNSIAIPTNFTISVTTEIIPVSMQKTSVDCTMYICGDSTECSNLLLQYGSFCTQLNRALHEIAVEQDKNTQEVFAQVKQIYKTPPIKDFGGFNFSQILPDPSKSSKRSFIEDLLFNKVTLADAGFIKGYGDCLGDIAARDLICAQKFNGLTVLPPLLTDEMIAAYTSALLAGTITAGWTFGAGAALQIPFAMQMAYRFNGIGVTQNVLYENQKLIANQFNKAIGKIQDGLSSTASALGKLQDVVNQNAQALNTLVKQLSSNFGAISSVLNDILSRLDPPEAEVQIDRLINGRLQALNTYVTQQLIRAAEIRASANLAAEKMSECVLGQSKRVDFCGKGYHLMSFPQSAPHGVVFLHVTYVPTQFKNFTTAPAICHDGKAHFPREGVFVSNGTHWFVTQRNFYEPQPITTDNTFVSGNCDVVIGIVNNTVYDPLQPELDS

SEQ ID NO: 19 - protein, 1121 aa, Artificial Sequence
  Synthetic: (CoV2_S_6_pross) mutant Spike (S) protein amino acid sequence
AYTNSFTRGVYYPDKVFRSNVLHLTQDLFLPFFSNVTWFHAIHVSGTNGTKRFDNPVLPFNDGVYFASTEKSNIIRGWIFGTTLDSKTQSLLIVNNATNVVIKVCEFQFCEDPFLGVYYHKNNKSWMESEFHVYSSANNCTFEYVSQPFLMDLEGKQGNFKNLREFVFKNIDGYFKIYSKHTPINLVRDLPQGFSALEPLVDLPIGINITRFQILLALHRSYLTPGDSSSGWTAGAAAYYVGYLQPRTFLLKYNENGTITDAVDCALDPLSETKCTLKSFTVEKGIYQTSNFRVQPTESIVRFPNITNLCDFSEVFNATRFASVYAWNRKRISNCVADYSVLYNSTSFSTFKCYGVSPTKLNDLCFTNVYADSFVIRGDEVRQLAPGQTGKIADYNYKLPDDFTGCVIAWNSNNLDSRVGGNYNYLYRLFRKGNLKPFERDISTEIYQAGSTPCNGVEGFNCYFPLQSYGFQPTNGVGYQPYRVVVLSFELLHAPATVCGPKKNTNLVKNKCVNFNFNGLTGTGVLTESNKKFLSFQQFGRDSADTTDAVRDPQTNEILDITPCSFGGVSVITPGTNTSNQVAVLYQGVNCTEVPVAIHADQLTPTWRVYSTGSNVFQTRAGCLIGAEHVNNSYECDIPIGAGICASYQTQTNSPGSASSVASQSIIAYTMSLGAENSVAYSNNSIAIPTNFTISVTTEIIPVSMPKTSVDCTMYICGDSTECSNLLLQYGSFCTQLNRALTEIAVEQDKNTQEVFAQVKQIYKTPPIKDFGGFNFSQILPDPSKSSKRSFIEDLLFNKVTLADAGFIKGYGDCLGDIAARDLICAQKFNGLTVLPPLLTDEMIAAYTSALLAGTITAGWTFGAGAALQIPFAMQMAYRFNGIGVTQNVLYENQKLIANQFNKAIGKIQDGLSSTASALGKLQDVVNQNAQALNTLVKQLSSNFGAISSVLNDILSRLDPPEAEVQIDRLINGRLQSLQTYVTQQLIRAAEIRASANLAAEKMSECVLGQSKRVDFCGKGYHLMSFPQSAPHGVVFLHVTYVPTQYKNFTTAPAICHDGKAHFPREGVFVSNGTHWFVTQRNFYEPQIITTDNTFVSGNCDVVIGIVNNTVYDPLQPELDS

SEQ ID NO: 20 - protein, 1121 aa, Artificial Sequence
  Synthetic: (CoV2_S2_NTD_0_5_pross) mutant Spike (S) protein amino acid sequence
AYTNSFRRGVYYPDKIFRSNVLHLTQDLFLPFFSNVTWFHAINVSGTNGTKRFDNPVLPFNDGVYFAATEKNNIIRGWIFGSTLDSKTQTLLIVNNGTNIVIRVCEFNFCENPFLGVYYHKNNKSWSESGFHVYDSANNCTFEYVSHPFIMDLEGDSGNFKHLREFIFKNIDGWFLIYSSHTPINLVTDLPAGFSALELLVDLPIGINITRFQILLALHRSYLTPGDSRSGWTRGAAVYYVGYLQPRTFLLKYDENGTITDAVDCALDPLAETKCTLKSFTVEKGIYQTSNFRVRPTESIVRFPNITNLCPFGEVFNATRFASVYAWNRKRISNCVADYSVLYNSASFSTFKCYGVSPTKLNDLCFTNVYADSFVIRGDEVRQIAPGQTGKIADYNYKLPDDFTGCVIAWNSNNLDSKVGGNYNYLYRLFRKSNLKPFERDISTEIYQAGSTPCNGVEGFNCYFPLQSYGFQPTNGVGYQPYRVVVLSFELLHAPATVCGPKKSTNLVKNKCVNFNFNGLTGTGVLTESNKKFLPFQQFGRDIADTTDAVRDPQTLEILDITPCSFGGVSVITPGTDTSNEVAVLYQNVNCSEVPTAIHANQLTPTWRRYSTGSNIFQTRAGCLIGAEFVNNSYECDIPIGAGICASYDTQTNSRGSASSVASQSIIAYTMSLGSENSVSYSNTSIAIPTNFTISVTTEIIPVSMPKVSVDCKMYICGDHSECKNLLLQYGSFCTQLNRALHEIAEEQDKNLREVFAQVRQIYKTPPIKDFGGFNFSLILPDPSKPSKRSAIEDLLFNKVKLADAGFIEGYGDCLGDIAARDLICAQKFNGLTVLPPLLTDEMIAAYTAALLAGTITAGWTFGAGSALQIPFAMQMAYRFNGIGVTQNVLYENQKLIANQFNKAIGAIQEGLDETAEALGKLQDVVNQNAEALNTLVKQLSSNFGAISSSLNDILSRLDPPEAEVQIDRLINGRLQALNTFVTQLLIRAAEIRASAELAAEKMNECVLGQSKRVNFCGNGYHLMSFPQAAPHGVVFLHVTYVPTDHRNFTTAPAICHNGKAHFPRDGVFVSNGTHWFVTQRNFYEPQPITTDNTFVSGDCDVVIGIVNNTVYDPLKPELDS

SEQ ID NO: 21 - protein, 1121 aa, Artificial Sequence
  Synthetic: (CoV2_S2_NTD_2_pross) mutant Spike (S) protein amino acid sequence
AYTNSFTRGVYYPDKVFRSNVLHLTQDLFLPFFSNVTWFHAINVSGTNGTKRFDNPVLPFNDGVYFASTEKSNIIRGWIFGTTLDSKTQSLLIVNNGTNVVIRVCEFNFCENPFLGVYYHKNNKSWMESGFHVYTSANNCTFEYVSHPFIMDLEGDSGNFKHLREFIFKNIDGWFKIYSKHTPINLVTDLPAGFSALELLVDLPIGINITRFQILLALHRSYLTPGDSRSGWTRGAAVYYVGYLQPRTFLLKYNENGTITDAVDCALDPLAETKCTLKSFTVEKGIYQTSNFRVQPTESIVRFPNITNLCPFGEVFNATRFASVYAWNRKRISNCVADYSVLYNSASFSTFKCYGVSPTKLNDLCFTNVYADSFVIRGDEVRQIAPGQTGKIADYNYKLPDDFTGCVIAWNSNNLDSKVGGNYNYLYRLFRKSNLKPFERDISTEIYQAGSTPCNGVEGFNCYFPLQSYGFQPTNGVGYQPYRVVVLSFELLHAPATVCGPKKSTNLVKNKCVNFNFNGLTGTGVLTESNKKFLPFQQFGRDIADTTDAVRDPQTLEILDITPCSFGGVSVITPGTNTSNQVAVLYQNVNCTEVPVAIHANQLTPTWRRYSTGSNIFQTRAGCLIGAEHVNNSYECDIPIGAGICASYDTQTNSPGSASSVASQSIIAYTMSLGSENSVSYSNDSIAIPTNFTISVTTEIIPVSMQKVSVDCKMYICGDHSECSNLLLQYGSFCTQLNRALHEIAEEQDKNTLEVFAQVKQIYKTPPIKDFGGFNFSLILPDPSKPSKRSAIEDLLFNKVKLADAGFIEGYGDCLGDIAARDLICAQKFNGLTVLPPLLTDEMIAAYTAALLAGTITAGWTFGAGSALVIPFAMQMAYRFNGIGVTQNVLYENQKLIANQFNKAIGAIQEGLDATAEALGKLQDVVNQNAQALNTLVKQLSSNFGAISSVLNDILSRLDPPEAEVQIDRLINGRLQALNTFVTQLLIRAAEIRASAELAAEKMSECVLGQSKRVDFCGNGYHLMSFPQAAPHGVVFLHVTYVPTDYRNFTTAPAICHNGKAHFPREGVFVSNGTHWFVTQRNFYEPQPITTDNTFVSGDCDVVIGIVNNTVYDPLQPELDS

SEQ ID NO: 22 - protein, 1121 aa, Artificial Sequence
  Synthetic: (CoV2_S2_NTD_3_pross) mutant Spike (S) protein amino acid sequence
AYTNSFTRGVYYPDKVFRSNVLHLTQDLFLPFFSNVTWFHAIHVSGTNGTKRFDNPVLPFNDGVYFASTEKSNIIRGWIFGTTLDSKTQSLLIVNNGTNVVIRVCEFNFCEDPFLGVYYHKNNKSWMESGFHVYSSANNCTFEYVSQPFLMDLEGDSGNFKNLREFIFKNIDGWFHIYSKHTPINLVRDLPEGFSALEPLVDLPIGINITRFQILLALHRSYLTPGDSRSGWTRGAAVYYVGYLQPRTFLLKYNENGTITDAVDCALDPLAETKCTLKSFTVEKGIYQTSNFRVQPTESIVRFPNITNLCPFGEVFNATRFASVYAWNRKRISNCVADYSVLYNSASFSTFKCYGVSPTKLNDLCFTNVYADSFVIRGDEVRQIAPGQTGKIADYNYKLPDDFTGCVIAWNSNNLDSKVGGNYNYLYRLFRKSNLKPFERDISTEIYQAGSTPCNGVEGFNCYFPLQSYGFQPTNGVGYQPYRVVVLSFELLHAPATVCGPKKSTNLVKNKCVNFNFNGLTGTGVLTESNKKFLPFQQFGRDIADTTDAVRDPQTLEILDITPCSFGGVSVITPGTNTSNQVAVLYQGVNCTEVPVAIHADQLTPTWRRYSTGSNIFQTRAGCLIGAEYVNNSYECDIPIGAGICASYDTQTNSPGSASSVASQSIIAYTMSLGEENSVSYDNNSIAIPTNFTISVTTEIIPVSMQKVSVDCTMYICGDHSECSNLLLQYGSFCTQLNRALHEIAVEQDKNTLEVFAQVKQIYKTPPIKDFGGFNFSQILPDPSKPSKRSAIEDLLFNKVTLADAGFIKGYGDCLGDIAARDLICAQKFNGLTVLPPLLTDEMIAAYTSALLAGTITAGWTFGAGSALQIPFAMQMAYRFNGIGVTQNVLYENQKLIANQFNKAIGAIQDGLDSTASALGKLQDVVNQNAQALNTLVKQLSSNFGAISSVLNDILSRLDPPEAEVQIDRLINGRLQALNTYVTQLLIRAAEIRASANLAAEKMSECVLGQSKRVDFCGKGYHLMSFPQAAPHGVVFLHVTYVPTQYKNFTTAPAICHNGKAHFPREGVFVSNGTHWFVTQRNFYEPQIITTDNTFVSGDCDVVIGIVNNTVYDPLQPELDS

SEQ ID NO: 23 - protein, 1121 aa, Artificial Sequence
  Synthetic: (CoV2_S2_NTD_5_pross) mutant Spike (S) protein amino acid sequence
AYTNSFTRGVYYPDKVFRSNVLHLTQDLFLPFFSNVTWFHAIHVSGTNGTKRFDNPVLPFNDGVYFASTEKSNIIRGWIFGTTLDSKTQSLLIVNNATNVVIKVCEFQFCEDPFLGVYYHKNNKSWMESEFHVYSSANNCTFEYVSQPFLMDLEGKQGNFKNLREFVFKNIDGYFHIYSKHTPINLVRDLPEGFSALEPLVDLPIGINITRFQILLALHRSYLTPGDSRSGWTAGAAAYYVGYLQPRTFLLKYNENGTITDAVDCALDPLSETKCTLKSFTVEKGIYQTSNFRVQPTESIVRFPNITNLCPFGEVFNATRFASVYAWNRKRISNCVADYSVLYNSASFSTFKCYGVSPTKLNDLCFTNVYADSFVIRGDEVRQIAPGQTGKIADYNYKLPDDFTGCVIAWNSNNLDSKVGGNYNYLYRLFRKSNLKPFERDISTEIYQAGSTPCNGVEGFNCYFPLQSYGFQPTNGVGYQPYRVVVLSFELLHAPATVCGPKKSTNLVKNKCVNFNFNGLTGTGVLTESNKKFLPFQQFGRDIADTTDAVRDPQTLEILDITPCSFGGVSVITPGTNTSNQVAVLYQGVNCTEVPVAIHADQLTPTWRRYSTGSNVFQTRAGCLIGAEYVNNSYECDIPIGAGICASYDTQTNSPGSASSVASQSIIAYTMSLGAENSVAYSNNSIAIPTNFTISVTTEIIPVSMQKTSVDCTMYICGDSTECSNLLLQYGSFCTQLNRALHEIAVEQDKNTQEVFAQVKQIYKTPPIKDFGGFNFSQILPDPSKPSKRSFIEDLLFNKVTLADAGFIKGYGDCLGDIAARDLICAQKFNGLTVLPPLLTDEMIAAYTSALLAGTITAGWTFGAGAALQIPFAMQMAYRFNGIGVTQNVLYENQKLIANQFNKAIGKIQDGLSSTASALGKLQDVVNQNAQALNTLVKQLSSNFGAISSVLNDILSRLDPPEAEVQIDRLINGRLQALNTYVTQQLIRAAEIRASANLAAEKMSECVLGQSKRVDFCGKGYHLMSFPQSAPHGVVFLHVTYVPTQYKNFTTAPAICHDGKAHFPREGVFVSNGTHWFVTQRNFYEPQPITTDNTFVSGNCDVVIGIVNNTVYDPLQPELDS

SEQ ID NO: 24 - protein, 1121 aa, Artificial Sequence
  Synthetic: (CoV2_S2_NTD_6_pross) mutant Spike (S) protein amino acid sequence
AYTNSFTRGVYYPDKVFRSNVLHLTQDLFLPFFSNVTWFHAIHVSGTNGTKRFDNPVLPFNDGVYFASTEKSNIIRGWIFGTTLDSKTQSLLIVNNATNVVIKVCEFQFCEDPFLGVYYHKNNKSWMESEFHVYSSANNCTFEYVSQPFLMDLEGKQGNFKNLREFVFKNIDGYFKIYSKHTPINLVRDLPQGFSALEPLVDLPIGINITRFQILLALHRSYLTPGDSSSGWTAGAAAYYVGYLQPRTFLLKYNENGTITDAVDCALDPLSETKCTLKSFTVEKGIYQTSNFRVQPTESIVRFPNITNLCPFGEVFNATRFASVYAWNRKRISNCVADYSVLYNSASFSTFKCYGVSPTKLNDLCFTNVYADSFVIRGDEVRQIAPGQTGKIADYNYKLPDDFTGCVIAWNSNNLDSKVGGNYNYLYRLFRKSNLKPFERDISTEIYQAGSTPCNGVEGFNCYFPLQSYGFQPTNGVGYQPYRVVVLSFELLHAPATVCGPKKSTNLVKNKCVNFNFNGLTGTGVLTESNKKFLPFQQFGRDIADTTDAVRDPQTLEILDITPCSFGGVSVITPGTNTSNQVAVLYQGVNCTEVPVAIHADQLTPTWRVYSTGSNVFQTRAGCLIGAEHVNNSYECDIPIGAGICASYQTQTNSPGSASSVASQSIIAYTMSLGAENSVAYSNNSIAIPTNFTISVTTEIIPVSMPKTSVDCTMYICGDSTECSNLLLQYGSFCTQLNRALTEIAVEQDKNTQEVFAQVKQIYKTPPIKDFGGFNFSQILPDPSKPSKRSFIEDLLFNKVTLADAGFIKGYGDCLGDIAARDLICAQKFNGLTVLPPLLTDEMIAAYTSALLAGTITAGWTFGAGAALQIPFAMQMAYRFNGIGVTQNVLYENQKLIANQFNKAIGKIQDGLSSTASALGKLQDVVNQNAQALNTLVKQLSSNFGAISSVLNDILSRLDPPEAEVQIDRLINGRLQSLQTYVTQQLIRAAEIRASANLAAEKMSECVLGQSKRVDFCGKGYHLMSFPQSAPHGVVFLHVTYVPTQHKNFTTAPAICHDGKAHFPREGVFVSNGTHWFVTQRNFYEPQIITTDNTFVSGNCDVVIGIVNNTVYDPLQPELDS

SEQ ID NO: 25 - protein, 1121 aa, Artificial Sequence
  Synthetic: (CoV2_S2_1_pross) mutant Spike (S) protein amino acid sequence
AYTNSFTRGVYYPDKVFRSSVLHSTQDLFLPFFSNVTWFHAIHVSGTNGTKRFDNPVLPFNDGVYFASTEKSNIIRGWIFGTTLDSKTQSLLIVNNATNVVIKVCEFQFCNDPFLGVYYHKNNKSWMESEFRVYSSANNCTFEYVSQPFLMDLEGKQGNFKNLREFVFKNIDGYFKIYSKHTPINLVRDLPQGFSALEPLVDLPIGINITRFQTLLALHRSYLTPGDSSSGWTAGAAAYYVGYLQPRTFLLKYNENGTITDAVDCALDPLSETKCTLKSFTVEKGIYQTSNFRVQPTESIVRFPNITNLCPFGEVFNATRFASVYAWNRKRISNCVADYSVLYNSASFSTFKCYGVSPTKLNDLCFTNVYADSFVIRGDEVRQIAPGQTGKIADYNYKLPDDFTGCVIAWNSNNLDSKVGGNYNYLYRLFRKSNLKPFERDISTEIYQAGSTPCNGVEGFNCYFPLQSYGFQPTNGVGYQPYRVVVLSFELLHAPATVCGPKKSTNLVKNKCVNFNFNGLTGTGVLTESNKKFLPFQQFGRDIADTTDAVRDPQTLEILDITPCSFGGVSVITPGTNTSNQVAVLYQGVNCTEVPVAIHADQLTPTWRVYSTGSNVFQTRAGCLIGAEHVNNSYECDIPIGAGICASYQTQTNSPGSASSVASQSIIAYTMSLGSENSVSYSNDSIAIPTNFTISVTTEIIPVSMPKVSVDCKMYICGDHSECSNLLLQYGSFCTQLNRALHEIAEEQDKNMREVFAQVRQIYKTPPIKDFGGFNFSLILPDPSKPSKRSAIEDLLFNKVKLADAGFIEGYGDCLGDIAARDLICAQKFNGLTVLPPLLTDEMIAAYTAALLAGTITAGWTFGAGSALQIPFAMQMAYRFNGIGVTQNVLYENQKLIANQFNKAIGAIQEGLDETAEALGKLQDVVNQNAQALNTLVKQLSSNFGAISSSLNDILSRLDPPEAEVQIDRLINGRLQALNTFVTQLLIRAAEIRASAELAAEKMNECVLGQSKRVNFCGNGYHLMSFPQAAPHGVVFLHVTYVPTEYRNFTTAPAICHNGKAHFPRDGVFVSNGTHWFVTQRNFYEPQIITTDNTFVSGDCDVVIGIVNNTVYDPLQPELDS

SEQ ID NO: 26 - protein, 1121 aa, Artificial Sequence
  Synthetic: (CoV2_S2_2_pross) mutant Spike (S) protein amino acid sequence
AYTNSFTRGVYYPDKVFRSSVLHSTQDLFLPFFSNVTWFHAIHVSGTNGTKRFDNPVLPFNDGVYFASTEKSNIIRGWIFGTTLDSKTQSLLIVNNATNVVIKVCEFQFCNDPFLGVYYHKNNKSWMESEFRVYSSANNCTFEYVSQPFLMDLEGKQGNFKNLREFVFKNIDGYFKIYSKHTPINLVRDLPQGFSALEPLVDLPIGINITRFQTLLALHRSYLTPGDSSSGWTAGAAAYYVGYLQPRTFLLKYNENGTITDAVDCALDPLSETKCTLKSFTVEKGIYQTSNFRVQPTESIVRFPNITNLCPFGEVFNATRFASVYAWNRKRISNCVADYSVLYNSASFSTFKCYGVSPTKLNDLCFTNVYADSFVIRGDEVRQIAPGQTGKIADYNYKLPDDFTGCVIAWNSNNLDSKVGGNYNYLYRLFRKSNLKPFERDISTEIYQAGSTPCNGVEGFNCYFPLQSYGFQPTNGVGYQPYRVVVLSFELLHAPATVCGPKKSTNLVKNKCVNFNFNGLTGTGVLTESNKKFLPFQQFGRDIADTTDAVRDPQTLEILDITPCSFGGVSVITPGTNTSNQVAVLYQGVNCTEVPVAIHADQLTPTWRVYSTGSNVFQTRAGCLIGAEHVNNSYECDIPIGAGICASYQTQTNSPGSASSVASQSIIAYTMSLGSENSVSYSNDSIAIPTNFTISVTTEIIPVSMQKVSVDCKMYICGDHSECSNLLLQYGSFCTQLNRALHEIAEEQDKNTLEVFAQVKQIYKTPPIKDFGGFNFSLILPDPSKPSKRSAIEDLLFNKVKLADAGFIEGYGDCLGDIAARDLICAQKFNGLTVLPPLLTDEMIAAYTAALLAGTITAGWTFGAGSALQIPFAMQMAYRFNGIGVTQNVLYENQKLIANQFNKAIGAIQEGLDATAEALGKLQDVVNQNAQALNTLVKQLSSNFGAISSVLNDILSRLDPPEAEVQIDRLINGRLQALNTFVTQLLIRAAEIRASAELAAEKMSECVLGQSKRVDFCGNGYHLMSFPQAAPHGVVFLHVTYVPTDYRNFTTAPAICHNGKAHFPREGVFVSNGTHWFVTQRNFYEPQIITTDNTFVSGDCDVVIGIVNNTVYDPLQPELDS

SEQ ID NO: 27 - protein, 1121 aa, Artificial Sequence
  Synthetic: (CoV2_S2_3_pross) mutant Spike (S) protein amino acid sequence
AYTNSFTRGVYYPDKVFRSSVLHSTQDLFLPFFSNVTWFHAIHVSGTNGTKRFDNPVLPFNDGVYFASTEKSNIIRGWIFGTTLDSKTQSLLIVNNATNVVIKVCEFQFCNDPFLGVYYHKNNKSWMESEFRVYSSANNCTFEYVSQPFLMDLEGKQGNFKNLREFVFKNIDGYFKIYSKHTPINLVRDLPQGFSALEPLVDLPIGINITRFQTLLALHRSYLTPGDSSSGWTAGAAAYYVGYLQPRTFLLKYNENGTITDAVDCALDPLSETKCTLKSFTVEKGIYQTSNFRVQPTESIVRFPNITNLCPFGEVFNATRFASVYAWNRKRISNCVADYSVLYNSASFSTFKCYGVSPTKLNDLCFTNVYADSFVIRGDEVRQIAPGQTGKIADYNYKLPDDFTGCVIAWNSNNLDSKVGGNYNYLYRLFRKSNLKPFERDISTEIYQAGSTPCNGVEGFNCYFPLQSYGFQPTNGVGYQPYRVVVLSFELLHAPATVCGPKKSTNLVKNKCVNFNFNGLTGTGVLTESNKKFLPFQQFGRDIADTTDAVRDPQTLEILDITPCSFGGVSVITPGTNTSNQVAVLYQGVNCTEVPVAIHADQLTPTWRVYSTGSNVFQTRAGCLIGAEHVNNSYECDIPIGAGICASYQTQTNSPGSASSVASQSIIAYTMSLGEENSVSYDNNSIAIPTNFTISVTTEIIPVSMQKVSVDCTMYICGDHSECSNLLLQYGSFCTQLNRALHEIAVEQDKNTLEVFAQVKQIYKTPPIKDFGGFNFSQILPDPSKPSKRSAIEDLLFNKVTLADAGFIKGYGDCLGDIAARDLICAQKFNGLTVLPPLLTDEMIAAYTSALLAGTITAGWTFGAGSALQIPFAMQMAYRFNGIGVTQNVLYENQKLIANQFNKAIGAIQDGLDSTASALGKLQDVVNQNAQALNTLVKQLSSNFGAISSVLNDILSRLDPPEAEVQIDRLINGRLQALNTYVTQLLIRAAEIRASANLAAEKMSECVLGQSKRVDFCGKGYHLMSFPQAAPHGVVFLHVTYVPTQYKNFTTAPAICHNGKAHFPREGVFVSNGTHWFVTQRNFYEPQPITTDNTFVSGDCDVVIGIVNNTVYDPLQPELDS

SEQ ID NO: 28 - protein, 1121 aa, Artificial Sequence
  Synthetic: (CoV2_S2_4_pross) mutant Spike (S) protein amino acid sequence
AYTNSFTRGVYYPDKVFRSSVLHSTQDLFLPFFSNVTWFHAIHVSGTNGTKRFDNPVLPFNDGVYFASTEKSNIIRGWIFGTTLDSKTQSLLIVNNATNVVIKVCEFQFCNDPFLGVYYHKNNKSWMESEFRVYSSANNCTFEYVSQPFLMDLEGKQGNFKNLREFVFKNIDGYFKIYSKHTPINLVRDLPQGFSALEPLVDLPIGINITRFQTLLALHRSYLTPGDSSSGWTAGAAAYYVGYLQPRTFLLKYNENGTITDAVDCALDPLSETKCTLKSFTVEKGIYQTSNFRVQPTESIVRFPNITNLCPFGEVFNATRFASVYAWNRKRISNCVADYSVLYNSASFSTFKCYGVSPTKLNDLCFTNVYADSFVIRGDEVRQIAPGQTGKIADYNYKLPDDFTGCVIAWNSNNLDSKVGGNYNYLYRLFRKSNLKPFERDISTEIYQAGSTPCNGVEGFNCYFPLQSYGFQPTNGVGYQPYRVVVLSFELLHAPATVCGPKKSTNLVKNKCVNFNFNGLTGTGVLTESNKKFLPFQQFGRDIADTTDAVRDPQTLEILDITPCSFGGVSVITPGTNTSNQVAVLYQGVNCTEVPVAIHADQLTPTWRVYSTGSNVFQTRAGCLIGAEHVNNSYECDIPIGAGICASYQTQTNSPGSASSVASQSIIAYTMSLGEENSVAYSNNSIAIPTNFTISVTTEIIPVSMQKVSVDCTMYICGDSEECSNLLLQYGSFCTQLNRALHEIAVEQDKNTQEVFAQVKQIYKTPPIKDFGGFNFSQILPDPSKPSKRSAIEDLLFNKVTLADAGFIKGYGDCLGDIAARDLICAQKFNGLTVLPPLLTDEMIAAYTSALLAGTITAGWTFGAGAALQIPFAMQMAYRFNGIGVTQNVLYENQKLIANQFNKAIGKIQDGLSSTASALGKLQDVVNQNAQALNTLVKQLSSNFGAISSVLNDILSRLDPPEAEVQIDRLINGRLQALNTYVTQQLIRAAEIRASANLAAEKMSECVLGQSKRVDFCGKGYHLMSFPQSAPHGVVFLHVTYVPTQYKNFTTAPAICHNGKAHFPREGVFVSNGTHWFVTQRNFYEPQIITTDNTFVSGDCDVVIGIVNNTVYDPLQPELDS

SEQ ID NO: 29 - protein, 1121 aa, Artificial Sequence
  Synthetic: (CoV2_S2_6_pross) mutant Spike (S) protein amino acid sequence
AYTNSFTRGVYYPDKVFRSSVLHSTQDLFLPFFSNVTWFHAIHVSGTNGTKRFDNPVLPFNDGVYFASTEKSNIIRGWIFGTTLDSKTQSLLIVNNATNVVIKVCEFQFCNDPFLGVYYHKNNKSWMESEFRVYSSANNCTFEYVSQPFLMDLEGKQGNFKNLREFVFKNIDGYFKIYSKHTPINLVRDLPQGFSALEPLVDLPIGINITRFQTLLALHRSYLTPGDSSSGWTAGAAAYYVGYLQPRTFLLKYNENGTITDAVDCALDPLSETKCTLKSFTVEKGIYQTSNFRVQPTESIVRFPNITNLCPFGEVFNATRFASVYAWNRKRISNCVADYSVLYNSASFSTFKCYGVSPTKLNDLCFTNVYADSFVIRGDEVRQIAPGQTGKIADYNYKLPDDFTGCVIAWNSNNLDSKVGGNYNYLYRLFRKSNLKPFERDISTEIYQAGSTPCNGVEGFNCYFPLQSYGFQPTNGVGYQPYRVVVLSFELLHAPATVCGPKKSTNLVKNKCVNFNFNGLTGTGVLTESNKKFLPFQQFGRDIADTTDAVRDPQTLEILDITPCSFGGVSVITPGTNTSNQVAVLYQGVNCTEVPVAIHADQLTPTWRVYSTGSNVFQTRAGCLIGAEHVNNSYECDIPIGAGICASYQTQTNSPGSASSVASQSIIAYTMSLGAENSVAYSNNSIAIPTNFTISVTTEIIPVSMPKTSVDCTMYICGDSTECSNLLLQYGSFCTQLNRALTEIAVEQDKNTQEVFAQVKQIYKTPPIKDFGGFNFSQILPDPSKPSKRSFIEDLLFNKVTLADAGFIKGYGDCLGDIAARDLICAQKFNGLTVLPPLLTDEMIAAYTSALLAGTITAGWTFGAGAALQIPFAMQMAYRFNGIGVTQNVLYENQKLIANQFNKAIGKIQDGLSSTASALGKLQDVVNQNAQALNTLVKQLSSNFGAISSVLNDILSRLDPPEAEVQIDRLINGRLQSLQTYVTQQLIRAAEIRASANLAAEKMSECVLGQSKRVDFCGKGYHLMSFPQSAPHGVVFLHVTYVPTQHKNFTTAPAICHDGKAHFPREGVFVSNGTHWFVTQRNFYEPQIITTDNTFVSGNCDVVIGIVNNTVYDPLQPELDS

SEQ ID NO: 30 - protein, 1121 aa, Artificial Sequence
  Synthetic: (CoV2_S2_1_hbnet_pross) mutant Spike (S) protein amino acid sequence
AYTNSFTRGVYYPDKVFRSSVLHSTQDLFLPFFSNVTWFHAIHVSGTNGTKRFDNPVLPFNDGVYFASTEKSNIIRGWIFGTTLDSKTQSLLIVNNATNVVIKVCEFQFCNDPFLGVYYHKNNKSWMESEFRVYSSANNCTFEYVSQPFLMDLEGKQGNFKNLREFVFKNIDGYFKIYSKHTPINLVRDLPQGFSALEPLVDLPIGINITRFQTLLALHRSYLTPGDSSSGWTAGAAAYYVGYLQPRTFLLKYNENGTITDAVDCALDPLSETKCTLKSFTVEKGIYQTSNFRVQPTESIVRFPNITNLCPFGEVFNATRFASVYAWNRKRISNCVADYSVLYNSASFSTFKCYGVSPTKLNDLCFTNVYADSFVIRGDEVRQIAPGQTGKIADYNYKLPDDFTGCVIAWNSNNLDSKVGGNYNYLYRLFRKSNLKPFERDISTEIYQAGSTPCNGVEGFNCYFPLQSYGFQPTNGVGYQPYRVVVLSFELLHAPATVCGPKKSTNLVKNKCVNFNFNGLTGTGVLTESNKKFLPFQQFGRDIADTTDAVRDPQTLEILDITPCSFGGVSVITPGTNTSNQVAVLYQGVNCTEVPVAIHADQLTPTWRVYSTGSNVFQTRAGCLIGAEHVNNSYECDIPIGAGICASYQTQTNSPGSASSVASQSIIAYTMSLGAENSVAYSNNSIAIATNFTISVTTEILPVSMTKTSVDCTMYICGGSTECSNLLLQYGSFCTQLNRALTEIAVEQDKNTQEVFAQVKQIYKTPPIKDFGGFNFSQILPDPSKPSKRSAIEDLLFNKVKLADAGFIKGYGDCLGDIAARDSICAQKFNGLTILSSLLTDEMIAAFTSALLAGTITAGWTFGAGAALQIPFAMQMAYRFAGIGVTQNVLYENQKLIANQFNNAIGKIQDGLSSTASALGKLQDVVNQNAQALNTLVKQLSSNFGAISSVLNDILSNLDPPEAEVQIDRLITGRLQSLQTYVTQQAIRAAEIRASANLAATKMSECVLGQSKLVDFCGKGYHLMSFPQSAPHGVVFLHVTYVATQYKNFTTAPAICHDGKAHFPREGVFVSNGTHWFVTQRNFYEPQIITTDLTFVSGNCDVVIGIVNNTVYDPLQPELDS

SEQ ID NO: 31 - protein, 1121 aa, Artificial Sequence
  Synthetic: (CoV2_S2_2_hbnet_pross) mutant Spike (S) protein amino acid sequence
AYTNSFTRGVYYPDKVFRSSVLHSTQDLFLPFFSNVTWFHAIHVSGTNGTKRFDNPVLPFNDGVYFASTEKSNIIRGWIFGTTLDSKTQSLLIVNNATNVVIKVCEFQFCNDPFLGVYYHKNNKSWMESEFRVYSSANNCTFEYVSQPFLMDLEGKQGNFKNLREFVFKNIDGYFKIYSKHTPINLVRDLPQGFSALEPLVDLPIGINITRFQTLLALHRSYLTPGDSSSGWTAGAAAYYVGYLQPRTFLLKYNENGTITDAVDCALDPLSETKCTLKSFTVEKGIYQTSNFRVQPTESIVRFPNITNLCPFGEVFNATRFASVYAWNRKRISNCVADYSVLYNSASFSTFKCYGVSPTKLNDLCFTNVYADSFVIRGDEVRQIAPGQTGKIADYNYKLPDDFTGCVIAWNSNNLDSKVGGNYNYLYRLFRKSNLKPFERDISTEIYQAGSTPCNGVEGFNCYFPLQSYGFQPTNGVGYQPYRVVVLSFELLHAPATVCGPKKSTNLVKNKCVNFNFNGLTGTGVLTESNKKFLPFQQFGRDIADTTDAVRDPQTLEILDITPCSFGGVSVITPGTNTSNQVAVLYQGVNCTEVPVAIHADQLTPTWRVYSTGSNVFQTRAGCLIGAEHVNNSYECDIPIGAGICASYQTQTNSPGSASSVASQSIIAYTMSLGAENSVAYSNNSIAIATNFTISVTTEILPVSMTKTSVDCTMYICGGSTECSNLLLQYGSFCTQLNRALTEIAVEQDKNTQEVFAQVKQIYKTPPIKDFGGFNFSLILPDPSKPSKRSAIEDLLFNKVKLADAGFIKGYGDCLGDIAARDSICAQKFNGLTILSHLLTDEMIAAFTSALLAGTITAGWTFGAGAALQIPFAMQMAYRFAGIGVTQNVLYENQKLIANQFNNAIGKIQDGLSSTASALGKLQDVVNQNAQALNTLVKQLSSNFGAISSVLNDILSHLDPPEAEVQIDRLITGRLQSLQTYVTQQLIRAAEIRASANLAATKMSECVLGQSKLVDFCGKGYHLMSFPQSAPHGVVFLHVTYVATQYKNFTTAPAICHDGKAHFPREGVFVSNGTHWFVTQRNFYEPQIITTDLTFVSGNCDVVIGIVNNTVYDPLQPELDS

SEQ ID NO: 32 - protein, 1121 aa, Artificial Sequence
  Synthetic: (CoV2_S2_3_hbnet_pross) mutant Spike (S) protein amino acid sequence
AYTNSFTRGVYYPDKVFRSSVLHSTQDLFLPFFSNVTWFHAIHVSGTNGTKRFDNPVLPFNDGVYFASTEKSNIIRGWIFGTTLDSKTQSLLIVNNATNVVIKVCEFQFCNDPFLGVYYHKNNKSWMESEFRVYSSANNCTFEYVSQPFLMDLEGKQGNFKNLREFVFKNIDGYFKIYSKHTPINLVRDLPQGFSALEPLVDLPIGINITRFQTLLALHRSYLTPGDSSSGWTAGAAAYYVGYLQPRTFLLKYNENGTITDAVDCALDPLSETKCTLKSFTVEKGIYQTSNFRVQPTESIVRFPNITNLCPFGEVFNATRFASVYAWNRKRISNCVADYSVLYNSASFSTFKCYGVSPTKLNDLCFTNVYADSFVIRGDEVRQIAPGQTGKIADYNYKLPDDFTGCVIAWNSNNLDSKVGGNYNYLYRLFRKSNLKPFERDISTEIYQAGSTPCNGVEGFNCYFPLQSYGFQPTNGVGYQPYRVVVLSFELLHAPATVCGPKKSTNLVKNKCVNFNFNGLTGTGVLTESNKKFLPFQQFGRDIADTTDAVRDPQTLEILDITPCSFGGVSVITPGTNTSNQVAVLYQGVNCTEVPVAIHADQLTPTWRVYSTGSNVFQTRAGCLIGAEHVNNSYECDIPIGAGICASYQTQTNSPGSASSVASQSIIAYTMSLGAENSVAYSNNSIAIATNFTISVTTEILPVSMTKTSVDCTMYICGGSTECSNLLLQYGSFCTQLNRALTEIAVEQDKNTQEVFAQVKQIYKTPPIKDFGGFNFSLILPDPSKPSKRSAIEDLLFNKVKLADAGFIKGYGDCLGDIAARDSICAQKFNGLTILSSLLTDEMIAAFTSALLAGTITAGWTFGAGAALQIPFAMQMAYRFAGIGVTQNVLYENQKLIANQFNNAIGKIQDGLSSTASALGKLQDVVNQNAQALNTLVKQLSSNFGAISSVLNDILSNLDPPEAEVQIDRLITGRLQSLQTYVTQQAIRAAEIRASANLAATKMSECVLGQSKLVDFCGKGYHLMSFPQSAPHGVVFLHVTYVATQYKNFTTAPAICHDGKAHFPREGVFVSNGTHWFVTQRNFYEPQIITTDLTFVSGNCDVVIGIVNNTVYDPLQPELDS

SEQ ID NO: 33 - protein, 1121 aa, Artificial Sequence
  Synthetic: (CoV2_S2_4_hbnet_pross) mutant Spike (S) protein amino acid sequence
AYTNSFTRGVYYPDKVFRSSVLHSTQDLFLPFFSNVTWFHAIHVSGTNGTKRFDNPVLPFNDGVYFASTEKSNIIRGWIFGTTLDSKTQSLLIVNNATNVVIKVCEFQFCNDPFLGVYYHKNNKSWMESEFRVYSSANNCTFEYVSQPFLMDLEGKQGNFKNLREFVFKNIDGYFKIYSKHTPINLVRDLPQGFSALEPLVDLPIGINITRFQTLLALHRSYLTPGDSSSGWTAGAAAYYVGYLQPRTFLLKYNENGTITDAVDCALDPLSETKCTLKSFTVEKGIYQTSNFRVQPTESIVRFPNITNLCPFGEVFNATRFASVYAWNRKRISNCVADYSVLYNSASFSTFKCYGVSPTKLNDLCFTNVYADSFVIRGDEVRQIAPGQTGKIADYNYKLPDDFTGCVIAWNSNNLDSKVGGNYNYLYRLFRKSNLKPFERDISTEIYQAGSTPCNGVEGFNCYFPLQSYGFQPTNGVGYQPYRVVVLSFELLHAPATVCGPKKSTNLVKNKCVNFNFNGLTGTGVLTESNKKFLPFQQFGRDIADTTDAVRDPQTLEILDITPCSFGGVSVITPGTNTSNQVAVLYQGVNCTEVPVAIHADQLTPTWRVYSTGSNVFQTRAGCLIGAEHVNNSYECDIPIGAGICASYQTQTNSPGSASSVASQSIIAYTMSLGAENSVAYSNNSIAIATNFTISVTTEILPVSMTKTSVDCTMYICGGSTECSNLLLQYGSFCTQLNRALTEIAVEQDKNTQEVFAQVKQIYKTPPIKDFGGFNFSLILPDPSKPSKRSAIEDLLFNKVKLADAGFIKGYGDCLGDIAARDSICAQKFNGLTILSHLLTDEMIAAFTSALLAGTITAGWTFGAGAALQIPFAMQMAYRFAGIGVTQNVLYENQKLIANQFNNAIGKIQDGLSSTASALGKLQDVVNQNAQALNTLVKQLSSNFGAISSVLNDILSNLDPPEAEVQIDRLITGRLQSLQTYVTQQAIRAAEIRASANLAATKMSECVLGQSKLVDFCGKGYHLMSFPQSAPHGVVFLHVTYVATQYKNFTTAPAICHDGKAHFPREGVFVSNGTHWFVTQRNFYEPQIITTDLTFVSGNCDVVIGIVNNTVYDPLQPELDS

SEQ ID NO: 34 - protein, 1121 aa, Artificial Sequence
  Synthetic: (CoV2_S2_5_hbnet_pross) mutant Spike (S) protein amino acid sequence
AYTNSFTRGVYYPDKVFRSSVLHSTQDLFLPFFSNVTWFHAIHVSGTNGTKRFDNPVLPFNDGVYFASTEKSNIIRGWIFGTTLDSKTQSLLIVNNATNVVIKVCEFQFCNDPFLGVYYHKNNKSWMESEFRVYSSANNCTFEYVSQPFLMDLEGKQGNFKNLREFVFKNIDGYFKIYSKHTPINLVRDLPQGFSALEPLVDLPIGINITRFQTLLALHRSYLTPGDSSSGWTAGAAAYYVGYLQPRTFLLKYNENGTITDAVDCALDPLSETKCTLKSFTVEKGIYQTSNFRVQPTESIVRFPNITNLCPFGEVFNATRFASVYAWNRKRISNCVADYSVLYNSASFSTFKCYGVSPTKLNDLCFTNVYADSFVIRGDEVRQIAPGQTGKIADYNYKLPDDFTGCVIAWNSNNLDSKVGGNYNYLYRLFRKSNLKPFERDISTEIYQAGSTPCNGVEGFNCYFPLQSYGFQPTNGVGYQPYRVVVLSFELLHAPATVCGPKKSTNLVKNKCVNFNFNGLTGTGVLTESNKKFLPFQQFGRDIADTTDAVRDPQTLEILDITPCSFGGVSVITPGTNTSNEVAVLYQGVNCTEVPVAIHADQLTPTWRVYSTGSNVFQTRAGCLIGAEHVNNSYECDIPIGAGICASYQTQTNSPGSASSVASQSIIAYTMSLGAENSVAYSNNSIAIATNFTISVTTEILPVSMSKTSVDCTMYICGGSTECSNLLLQYGSFCTQLNRALTEIAVEQDKNTQEVFAQVKQIYKTPPIKDFGGFNFSQILPDPSKPSKRSAIEDLLFNKVKLADAGFIKGYGDCLGDIAARDSICAQKFNGLTILSSLLTDEMIAAFTSALLAGTITAGWTFGAGAALQIPFAMQMAYRFAGIGVTQNVLYENQKLIANQFNKAIGKIQDGLSSTASALGKLQDVVNQNAQALNTLVKQLSSNFGAISSVLNDILSNLDPPEAEVQIDRLITGRLQSLQTYVTQQAIRAAEIRASANLAATKMSECVLGQSKLVDFCGKGYHLMSFPQSAPHGVVFLHVTYVATQYKNFTTAPAICHDGKAHFPREGVFVSNGTHWFVTQRNFYEPQIITTDLTFVSGNCDVVIGIVNNTVYDPLQPELDS

SEQ ID NO: 35 - protein, 1121 aa, Artificial Sequence
  Synthetic: (CoV_2_S_openDS1, SEQ ID NO: 4 as parent) mutant Spike (S) protein amino acid sequence
AYTNSFTRGVYYPDKVFRSSVLHSTQDLFLPFFSNVTWFHAIHVSGTNGTKRFDNPVLPFNDGVYFASTEKSNIIRGWIFGTTLDSKTQSLLIVNNATNVVIKVCEFQFCNDPFLGVYYHKNNKSWMESEFRVYSSANNCTFEYVSQPFLMDLEGKQGNFKNLREFVFKNIDGYFKIYSKHTPINLVRDLPQGFSALEPLVDLPIGINITRFQTLLALHRSYLTPGDSSSGWTAGAAAYYVGYLQPRTFLLKYNENGTITDAVDCALDPLSETKCTLKSFTVEKGIYQTSNFRVQPTESIVRFPNITNLCPFGEVFNATRFASVYAWNRKRISNCVADYSVLYNSASFSTFKCYGVSPTKLNDLCFTNVYADSFVIRGDEVRQIAPGQTGKIADYNYKLPDDFTGCVIAWNSNNLDSKVGGNYNYLYRLFRKSNLKPFERDISTEIYQAGSTPCNGVEGFNCYFPLQSYGFQPTNGVGYQPYRVVVLSFELLHAPATVCGPKKSTNLVKNKCVNFNFNGLTGTGVLTESNKKFLPFQQFGRDIADTTDAVRDPQTLEILDITPCSFGGVSVITPGTNTSNQVAVLYQGVNCTEVPVAIHADQLTPTWRVYSTGSNVFQTRAGCLIGAEHVNNSYECDIPIGAGICASYQTQTNSPGSASSVASQSIIAYTMSLGAENSVAYSNNSIAIPTNFTISVTTEILPVSMTKTSVDCTMYICGDSTECSNLLLQYGSFCTQLNRALTGCAVEQDKNTQEVFAQVKQIYKTPPIKDFGGFNFSQILPDPSKPSKRSFIEDLLFNKVTLADAGFIKQYGDCLGDIAARDLICAQKFNGLTVLPPLLTDEMIAQYTSALLAGTITSGWTFGAGAALQIPFAMQMAYRFNGIGVTQNVLYENQKLIANQFNSAIGKIQDSLSSTASALGKLQDVVNQNAQALNTLVKQLSSNFGAISSVLNDILSRLDPPEAEVQIDRLITGRLQSLQTYVTQQLIRCAEIRASANLAATKMSECVLGQSKRVDFCGKGYHLMSFPQSAPHGVVFLHVTYVPAQEKNFTTAPAICHDGKAHFPREGVFVSNGTHWFVTQRNFYEPQIITTDNTFVSGNCDVVIGIVNNTVYDPLQPELDS

SEQ ID NO: 36 - protein, 1121 aa, Artificial Sequence
  Synthetic: (CoV_2_S_openDS2, SEQ ID NO: 4 as parent) mutant Spike (S) protein amino acid sequence
AYTNSFTRGVYYPDKVFRSSVLHSTQDLFLPFFSNVTWFHAIHVSGTNGTKRFDNPVLPFNDGVYFASTEKSNIIRGWIFGTTLDSKTQSLLIVNNATNVVIKVCEFQFCNDPFLGVYYHKNNKSWMESEFRVYSSANNCTFEYVSQPFLMDLEGKQGNFKNLREFVFKNIDGYFKIYSKHTPINLVRDLPQGFSALEPLVDLPIGINITRFQTLLALHRSYLTPGDSSSGWTAGAAAYYVGYLQPRTFLLKYNENGTITDAVDCALDPLSETKCTLKSFTVEKGIYQTSNFRVQPTESIVRFPNITNLCPFGEVFNATRFASVYAWNRKRISNCVADYSVLYNSASFSTFKCYGVSPTKLNDLCFTNVYADSFVIRGDEVRQIAPGQTGKIADYNYKLPDDFTGCVIAWNSNNLDSKVGGNYNYLYRLFRKSNLKPFERDISTEIYQAGSTPCNGVEGFNCYFPLQSYGFQPTNGVGYQPYRVVVLSFELLHAPATVCGPKKSTNLVKNKCVNFNFNGLTGTGVLTESNKKFLPFQQFGRDIADTTDAVRDPQTLEILDITPCSFGGVSVITPGTNTSNQVAVLYQGVNCTEVPVAIHADQLTPTWRVYSTGSNVFQTRAGCLIGAEHVNNSYECDIPIGAGICASYQTQTNSPGSASSVASQSIIAYTMSLGAENSVAYSNNSIAIPTNFTISVTTEILPVSMTKTSVDCTMYICGDSTECSNLLLQYGSFCTQLNRALTGIAVEQDKNTQEVFAQVKQIYKTPPIKDFGGFNFSQILPDPSKPSKRSFIEDLLFNKVTLADAGFIKQYGCCLGDIAARDLICAQKFNGLTVLCPLLTDEMIAQYTSALLAGTITSGWTFGAGAALQIPFAMQMAYRFNGIGVTQNVLYENQKLIANQFNSAIGKIQDSLSSTASALGKLQDVVNQNAQALNTLVKQLSSNFGAISSVLNDILSRLDPPEAEVQIDRLITGRLQSLQTYVTQQLIRAAEIRASANLAATKMSECVLGQSKRVDFCGKGYHLMSFPQSAPHGVVFLHVTYVPAQEKNFTTAPAICHDGKAHFPREGVFVSNGTHWFVTQRNFYEPQIITTDNTFVSGNCDVVIGIVNNTVYDPLQPELDS

SEQ ID NO: 37 - protein, 1121 aa, Artificial Sequence
  Synthetic: (CoV_2_S_openDS3, SEQ ID NO: 4 as parent) mutant Spike (S) protein amino acid sequence
AYTNSFTRGVYYPDKVFRSSVLHSTQDLFLPFFSNVTWFHAIHVSGTNGTKRFDNPVLPFNDGVYFASTEKSNIIRGWIFGTTLDSKTQSLLIVNNATNVVIKVCEFQFCNDPFLGVYYHKNNKSWMESEFRVYSSANNCTFEYVSQPFLMDLEGKQGNFKNLREFVFKNIDGYFKIYSKHTPINLVRDLPQGFSALEPLVDLPIGINITRFQTLLALHRSYLTPGDSSSGWTAGAAAYYVGYLQPRTFLLKYNENGTITDAVDCALDPLSETKCTLKSFTVEKGIYQTSNFRVQPTESIVRFPNITNLCPFGEVFNATRFASVYAWNRKRISNCVADYSVLYNSASFSTFKCYGVSPTKLNDLCFTNVYADSFVIRGDEVRQIAPGQTGKIADYNYKLPDDFTGCVIAWNSNNLDSKVGGNYNYLYRLFRKSNLKPFERDISTEIYQAGSTPCNGVEGFNCYFPLQSYGFQPTNGVGYQPYRVVVLSFELLHAPATVCGPKKSTNLVKNKCVNFNFNGLTGTGVLTESNKKFLPFQQFGRDICDTTDAVRDPQTLEILDITPCSFGGVSVITPGTNTSNQVAVLYQGVNCTEVPVAIHADQLTPTWRVYSTGSNVFQTRAGCLIGAEHVNNSYECDIPIGAGICASYQTQTNSPGSASSVASQSIIAYTMSLGAENSVAYSNNSIAIPTNFTISVTTEILPVSMTKTSVDCTMYICGDSTECSNLLLQYGSFCTQLNRALTGIAVEQDKNTQEVFAQVKQIYKTPPIKDFGGFNFSQILPDPSKPSKRSFIEDLLFNKVTLADAGFIKQYGDCLGDIAARDLICAQKFNGLTVLPPLLTDEMIAQYTSALLAGTITSGWTFGAGAALQIPFAMQMAYRFNGIGVTQNVLYENQKLIANQFNSAIGKIQDSLSSTASALGKLQDVVNQNAQALNTLVKQLCSNFGAISSVLNDILSRLDPPEAEVQIDRLITGRLQSLQTYVTQQLIRAAEIRASANLAATKMSECVLGQSKRVDFCGKGYHLMSFPQSAPHGVVFLHVTYVPAQEKNFTTAPAICHDGKAHFPREGVFVSNGTHWFVTQRNFYEPQIITTDNTFVSGNCDVVIGIVNNTVYDPLQPELDS

SEQ ID NO: 38 - protein, 1121 aa, Artificial Sequence
  Synthetic: (CoV_2_S_openDS4, SEQ ID NO: 4 as parent) mutant Spike (S) protein amino acid sequence
AYTNSFTRGVYYPDKVFRSSVLHSTQDLFLPFFSNVTWFHAIHVSGTNGTKRFDNPVLPFNDGVYFASTEKSNIIRGWIFGTTLDSKTQSLLIVNNATNVVIKVCEFQFCNDPFLGVYYHKNNKSWMESEFRVYSSANNCTFEYVSQPFLMDLEGKQGNFKNLREFVFKNIDGYFKIYSKHTPINLVRDLPQGFSALEPLVDLPIGINITRFQTLLALHRSYLTPGDSSSGWTAGAAAYYVGYLQPRTFLLKYNENGTITDAVDCALDPLSETKCTLKSFTVEKGIYQTSNFRVQPTESIVRFPNITNLCPFGEVFNATRFASVYAWNRKRISNCVADYSVLYNSASFSTFKCYGVSPTKLNDLCFTNVYADSFVIRGDEVRQIAPGQTGKIADYNYKLPDDFTGCVIAWNSNNLDSKVGGNYNYLYRLFRKSNLKPFERDISTEIYQAGSTPCNGVEGFNCYFPLQSYGFQPTNGVGYQPYRVVVLSFELLHAPATVCGPKKSTNLVKNKCVNFNFNGLTGTGVLTESNKKFLPFQQFGRDIADTTDAVRDPQTLEILCITPCSFGGVSVITPGTNTSNQVAVLYQGVNCTEVPVAIHADQLTPTWRVYSTGSNVFQTRAGCLIGAEHVNNSYECDIPIGAGICASYQTQTNSPGSASSVASQSIIAYTMSLGAENSVAYSNNSIAIPTNFTISVTTEILPVSMTKTSVDCTMYICGDSTECSNLLLQYGSFCTQLNRALTGIAVEQDKNTQEVFAQVKQIYKTPPIKDFGGFNFSQILPDPSKPSKRSFIEDLLFNKVTLADAGFIKQYGDCLGDIAARDLCCAQKFNGLTVLPPLLTDEMIAQYTSALLAGTITSGWTFGAGAALQIPFAMQMAYRFNGIGVTQNVLYENQKLIANQFNSAIGKIQDSLSSTASALGKLQDVVNQNAQALNTLVKQLSSNFGAISSVLNDILSRLDPPEAEVQIDRLITGRLQSLQTYVTQQLIRAAEIRASANLAATKMSECVLGQSKRVDFCGKGYHLMSFPQSAPHGVVFLHVTYVPAQEKNFTTAPAICHDGKAHFPREGVFVSNGTHWFVTQRNFYEPQIITTDNTFVSGNCDVVIGIVNNTVYDPLQPELDS

SEQ ID NO: 39 - protein, 1121 aa, Artificial Sequence
  Synthetic: (CoV_2_S_closedDS1, SEQ ID NO: 4 as parent) mutant Spike (S) protein amino acid sequence
AYTNSFTRGVYYPDKVFRSSVLHSTQDLFLPFFSNVTWFHAIHVSGTNGTKRFDNPVLPFNDGVYFASTEKSNIIRGWIFGTTLDSKTQSLLIVNNATNVVIKVCEFQFCNDPFLGVYYHKNNKSWMESEFRVYSSANNCTFEYVSQPFLMDLEGKQGNFKNLREFVFKNIDGYFKIYSKHTPINLVRDLPQGFSALEPLVDLPIGINITRFQTLLALHRSYLTPGDSSSGWTAGAAAYYVGYLQPRTFLLKYNENGTITDAVDCALDPLSETKCTLKSFTVEKGIYQTSNFRVQPTESIVRFPNITNLCPFGEVFNATRFASVYAWNRKRISNCVADYSVLYNSASFSTFKCYGVSPTKLNDLCFTNVYADSFVIRGDEVRQIAPCQTGKIADYNYKLPDDFTGCVIAWNSNNLDSKVGGNYNYLYRLFRKSNLKPFERDISTEIYQAGSTPCNGVEGFNCYFPLQSYGFQPTNGVGYQPYRVVVLSFELLHAPATVCGPKKSTNLVKNKCVNFNFNGLTGTGVLTESNKKFLPFQQFGRDIADTTDAVRDPQTLEILDITPCSFGGVSVITPGTNTSNQVAVLYQGVNCTEVPVAIHADQLTPTWRVYSTGSNVFQTRAGCLIGAEHVNNSYECDIPIGAGICASYQTQTNSPGSASSVASQSIIAYTMSLGAENSVAYSNNSIAIPTNFTISVTTEILPVSMTKTSVDCTMYICGDSTECSNLLLQYGSFCTQLNRALTGIAVEQDKNTQEVFAQVKQIYKTPPIKDFGGFNFSQILPDPSKPSKRSFIEDLLFNKVTLADAGFIKQYGDCLGDIAARDLICAQKFNGLTVLPPLLTDEMIAQYTSALLAGTITSGWTFGAGAALQIPFAMQMAYRFNGIGVTQNVLYENQKLIANQFNSAIGKIQDSLSSTASALGKLQDVVNQNAQALNTLVKQLSSNFGAISSVLNDILSRLDPCEAEVQIDRLITGRLQSLQTYVTQQLIRAAEIRASANLAATKMSECVLGQSKRVDFCGKGYHLMSFPQSAPHGVVFLHVTYVPAQEKNFTTAPAICHDGKAHFPREGVFVSNGTHWFVTQRNFYEPQIITTDNTFVSGNCDVVIGIVNNTVYDPLQPELDS

SEQ ID NO: 40 - protein, 1121 aa, Artificial Sequence
  Synthetic: (CoV_2_S_closedDS2, SEQ ID NO: 4 as parent) mutant Spike (S) protein amino acid sequence
AYTNSFTRGVYYPDKVFRSSVLHSTQDLFLPFFSNVTWFHAIHVSGTNGTKRFDNPVLPFNDGVYFASTEKSNIIRGWIFGTTLDSKTQSLLIVNNATNVVIKVCEFQFCNDPFLGVYYHKNNKSWMESEFRVYSSANNCTFEYVSQPFLMDLEGKQGNFKNLREFVFKNIDGYFKIYSKHTPINLVRDLPQGFSALEPLVDLPIGINITRFQTLLALHRSYLTPGDSSSGWTAGAAAYYVGYLQPRTFLLKYNENGTITDAVDCALDPLSETKCTLKSFTVEKGIYQTSNFRVQPTESIVRFPNITNLCPFGEVFNATRFASVYAWNRKRISNCVADYSVLYNSASFSTFKCYGVCPTKLNDLCFTNVYADSFVIRGDEVRQIAPGQTGKIADYNYKLPDDFTGCVIAWNSNNLDSKVGGNYNYLYRLFRKSNLKPFERDISTEIYQAGSTPCNGVEGFNCYFPLQSYGFQPTNGVGYQPYRVVVLSFELLHAPATVCGPKKSTNLVKNKCVNFNFNGLTGTGVLTESNKKFLPFQQFGRDIADTTDAVRDPQTLEILDITPCSFGGVSVITPGTNTSNQVAVLYQGVNCTEVPVAIHADQLTPTWRVYSTGSNVFQTRAGCLIGAEHVNNSYECDIPIGAGICASYQTQTNSPGSASSVASQSIIAYTMSLGAENSVAYSNNSIAIPTNFTISVTTEILPVSMTKTSVDCTMYICGDSTECSNLLLQYGSFCTQLNRALTGIAVEQDKNTQEVFAQVKQIYKTPPIKDFGGFNFSQILPDPSKPSKRSFIEDLLFNKVTLADAGFIKQYGDCLGDIAARDLICAQKFNGLTVLPPLLTDEMIAQYTSALLAGTITSGWTFGAGAALQIPFAMQMAYRFNGIGVTQNVLYENQKLIANQFNSAIGKIQDSLSSTASALGKLQDVVNQNAQALNTLVKQLSSNFGAISSVLNDILSRLCPPEAEVQIDRLITGRLQSLQTYVTQQLIRAAEIRASANLAATKMSECVLGQSKRVDFCGKGYHLMSFPQSAPHGVVFLHVTYVPAQEKNFTTAPAICHDGKAHFPREGVFVSNGTHWFVTQRNFYEPQIITTDNTFVSGNCDVVIGIVNNTVYDPLQPELDS

SEQ ID NO: 41 - protein, 1121 aa, Artificial Sequence
  Synthetic: (CoV_2_S_closedDS3, SEQ ID NO: 4 as parent) mutant Spike (S) protein amino acid sequence
AYTNSFTRGVYYPDKVFRSSVLHSTQDLFLPFFSNVTWFHAIHVSGTNGTKRFDNPVLPFNDGVYFASTEKSNIIRGWIFGTTLDSKTQSLLIVNNATNVVIKVCEFQFCNDPFLGVYYHKNNKSWMESEFRVYSSANNCTFEYVSQPFLMDLEGKQGNFKNLREFVFKNIDGYFKIYSKHTPINLVRDLPQGFSALEPLVDLPIGINITRFQTLLALHRSYLTPGDSSSGWTAGAAAYYVGYLQPRTFLLKYNENGTITDAVDCALDPLSETKCTLKSFTVEKGIYQTSNFRVQPTESIVRFPNITNLCPFGEVFNATRFASVYAWNRKRISNCVADYSVLYNSASFSTFKCYGCSPTKLNDLCFTNVYADSFVIRGDEVRQIAPGQTGKIADYNYKLPDDFTGCVIAWNSNNLDSKVGGNYNYLYRLFRKSNLKPFERDISTEIYQAGSTPCNGVEGFNCYFPLQSYGFQPTNGVGYQPYRVVVLSFELLHAPATVCGPKKSTNLVKNKCVNFNFNGLTGTGVLTESNKKFLPFQQFGRDIADTTDAVRDPQTLEILDITPCSFGGVSVITPGTNTSNQVAVLYQGVNCTEVPVAIHADQLTPTWRVYSTGSNVFQTRAGCLIGAEHVNNSYECDIPIGAGICASYQTQTNSPGSASSVASQSIIAYTMSLGAENSVAYSNNSIAIPTNFTISVTTEILPVSMTKTSVDCTMYICGDSTECSNLLLQYGSFCTQLNRALTGIAVEQDKNTQEVFAQVKQIYKTPPIKDFGGFNFSQILPDPSKPSKRSFIEDLLFNKVTLADAGFIKQYGDCLGDIAARDLICAQKFNGLTVLPPLLTDEMIAQYTSALLAGTITSGWTFGAGAALQIPFAMQMAYRFNGIGVTQNVLYENQKLIANQFNSAIGKIQDSLSSTASALGKLQDVVNQNAQALNTLVKQLSSNFGAISSVLNDILSCLDPPEAEVQIDRLITGRLQSLQTYVTQQLIRAAEIRASANLAATKMSECVLGQSKRVDFCGKGYHLMSFPQSAPHGVVFLHVTYVPAQEKNFTTAPAICHDGKAHFPREGVFVSNGTHWFVTQRNFYEPQIITTDNTFVSGNCDVVIGIVNNTVYDPLQPELDS

SEQ ID NO: 42 - protein, 1121 aa, Artificial Sequence
  Synthetic: (CoV_2_S_closedDS4, SEQ ID NO: 4 as parent) mutant Spike (S) protein amino acid sequence
AYTNSFTRGVYYPDCVFRSSVLHSTQDLFLPFFSNVTWFHAIHVSGTNGTKRFDNPVLPFNDGVYFASTEKSNIIRGWIFGTTLDSKTQSLLIVNNATNVVIKVCEFQFCNDPFLGVYYHKNNKSWMESEFRVYSSANNCTFEYVSQPFLMDLEGKQGNFKNLREFVFKNIDGYFKIYSKHTPINLVRDLPQGFSALEPLVDLPIGINITRFQTLLALHRSYLTPGDSSSGWTAGAAAYYVGYLQPRTFLLKYNENGTITDAVDCALDPLSETKCTLKSFTVEKGIYQTSNFRVQPTESIVRFPNITNLCPFGEVFNATRFASVYAWNRKRISNCVADYSVLYNSASFSTFKCYGVSPTKLNDLCFTNVYADSFVIRGDEVRQIAPGQTGKIADYNYKLPDDFTGCVIAWNSNNLDSKVGGNYNYLYRLFRKSNLKPFERDISTEIYQAGSTPCNGVEGFNCYFPLQSYGFQPTNGVGYQPYRVVVLSFELLHCPATVCGPKKSTNLVKNKCVNFNFNGLTGTGVLTESNKKFLPFQQFGRDIADTTDAVRDPQTLEILDITPCSFGGVSVITPGTNTSNQVAVLYQGVNCTEVPVAIHADQLTPTWRVYSTGSNVFQTRAGCLIGAEHVNNSYECDIPIGAGICASYQTQTNSPGSASSVASQSIIAYTMSLGAENSVAYSNNSIAIPTNFTISVTTEILPVSMTKTSVDCTMYICGDSTECSNLLLQYGSFCTQLNRALTGIAVEQDKNTQEVFAQVKQIYKTPPIKDFGGFNFSQILPDPSKPSKRSFIEDLLFNKVTLADAGFIKQYGDCLGDIAARDLICAQKFNGLTVLPPLLTDEMIAQYTSALLAGTITSGWTFGAGAALQIPFAMQMAYRFNGIGVTQNVLYENQKLIANQFNSAIGKIQDSLSSTASALGKLQDVVNQNAQALNTLVKQLSSNFGAISSVLNDILSRLDPPEAEVQIDRLITGRLQSLQTYVTQQLIRAAEIRASANLAATKMSECVLGQSKRVDFCGKGYHLMSFPQSAPHGVVFLHVTYVPAQEKNFTTAPAICHDGKAHFPREGVFVSNGTHWFVTQRNFYEPQIITTDNTFVSGNCDVVIGIVNNTVYDPLQPELDS

SEQ ID NO: 43 - protein, 1121 aa, Artificial Sequence
  Synthetic: (CoV_2_S_closedDS5, SEQ ID NO: 4 as parent) mutant Spike (S) protein amino acid sequence
AYTNSFTRGVYYPDKVFRSSVLHSTQDLFLPFFSNVTWFHAIHVSGTNGTKRFDNPVLPFNDGVYFASTEKSNIIRGWIFGTTLDSKTQSLLIVNNATNVVIKVCEFQFCNDPFLGVYYHKNNKSWMESEFRVYSSANNCTFEYVSQPFLMDLEGKQGNFKNLREFVFKNIDGYFKIYSKHTPINLVRDLPQGFSALEPLVDLPIGINITRFQTLLALHRSYLTPGDSSSGWTAGAAAYYVGYLQPRTFLLKYNENGTITDAVDCALDPLSETKCTLKSFTVEKGIYQTSNFRVQPTESIVRFPNITNLCPFGEVFNATRFASVYAWNRKRISNCVADYSVLYNSASFSTFKCYGVSPTKLNDLCFTNVYADSFVIRGDEVRQIAPGQTGKIADYNYKLPDDFTGCVIAWNSNNLDSKVGGNYNYLYRLFRKSNLKPFERDISTEIYQAGSTPCNGVEGFNCYFPLQSYGFQPTNGVGYQPYRVVVLSFELLHAPCTVCGPKKSTNLVKNKCVNFNFCGLTGTGVLTESNKKFLPFQQFGRDIADTTDAVRDPQTLEILDITPCSFGGVSVITPGTNTSNQVAVLYQGVNCTEVPVAIHADQLTPTWRVYSTGSNVFQTRAGCLIGAEHVNNSYECDIPIGAGICASYQTQTNSPGSASSVASQSIIAYTMSLGAENSVAYSNNSIAIPTNFTISVTTEILPVSMTKTSVDCTMYICGDSTECSNLLLQYGSFCTQLNRALTGIAVEQDKNTQEVFAQVKQIYKTPPIKDFGGFNFSQILPDPSKPSKRSFIEDLLFNKVTLADAGFIKQYGDCLGDIAARDLICAQKFNGLTVLPPLLTDEMIAQYTSALLAGTITSGWTFGAGAALQIPFAMQMAYRFNGIGVTQNVLYENQKLIANQFNSAIGKIQDSLSSTASALGKLQDVVNQNAQALNTLVKQLSSNFGAISSVLNDILSRLDPPEAEVQIDRLITGRLQSLQTYVTQQLIRAAEIRASANLAATKMSECVLGQSKRVDFCGKGYHLMSFPQSAPHGVVFLHVTYVPAQEKNFTTAPAICHDGKAHFPREGVFVSNGTHWFVTQRNFYEPQIITTDNTFVSGNCDVVIGIVNNTVYDPLQPELDS

SEQ ID NO: 44 - protein, 1121 aa, Artificial Sequence
  Synthetic: (CoV_2_S_closedDS6, SEQ ID NO: 4 as parent) mutant Spike (S) protein amino acid sequence
AYTNSFTRGVYYPDKVFRSSVLHSTQDLFLPFFSNVTWFHAIHVSGTNGTKRFDNPVLPFNDGVYFASTEKSNIIRGWIFGTTLDSKTQSLLIVNNATNVVIKVCEFQFCNDPFLGVYYHKNNKSWMESEFRVYSSANNCTFEYVSQPFLMDLEGKQGNFKNLREFVFKNIDGYFKIYSKHTPINLVRDLPQGFSALEPLVDLPIGINITRFQTLLALHRSYLTPGDSSSGWTAGAAAYYVGYLQPRTFLLKYNENGTITDAVDCALDPLSETKCTLKSFTVEKGIYQTSNFRVQPTESIVRFPNITNLCPFGEVFNATRFASVYAWNRKRISNCVADYSVLYNSASFSTFKCYGVSPTKLNDLCFTNVYADSFVIRGDEVRQIAPGQTGKIADYNYKLPDDFTGCVIAWNSNNLDSKVGGNYNYLYRLFRKSNLKPFERDISTEIYQAGSTPCNGVEGFNCYFPLQSYGFQPTNGVGYQPYRVVVLSFELLHACATVCGPKKSTNLVKNKCVNFNFNGLTGTGVLTESNKKFLPFQCFGRDIADTTDAVRDPQTLEILDITPCSFGGVSVITPGTNTSNQVAVLYQGVNCTEVPVAIHADQLTPTWRVYSTGSNVFQTRAGCLIGAEHVNNSYECDIPIGAGICASYQTQTNSPGSASSVASQSIIAYTMSLGAENSVAYSNNSIAIPTNFTISVTTEILPVSMTKTSVDCTMYICGDSTECSNLLLQYGSFCTQLNRALTGIAVEQDKNTQEVFAQVKQIYKTPPIKDFGGFNFSQILPDPSKPSKRSFIEDLLFNKVTLADAGFIKQYGDCLGDIAARDLICAQKFNGLTVLPPLLTDEMIAQYTSALLAGTITSGWTFGAGAALQIPFAMQMAYRFNGIGVTQNVLYENQKLIANQFNSAIGKIQDSLSSTASALGKLQDVVNQNAQALNTLVKQLSSNFGAISSVLNDILSRLDPPEAEVQIDRLITGRLQSLQTYVTQQLIRAAEIRASANLAATKMSECVLGQSKRVDFCGKGYHLMSFPQSAPHGVVFLHVTYVPAQEKNFTTAPAICHDGKAHFPREGVFVSNGTHWFVTQRNFYEPQIITTDNTFVSGNCDVVIGIVNNTVYDPLQPELDS

SEQ ID NO: 45 - protein, 1121 aa, Artificial Sequence
  Synthetic: (CoV2_S_1_hbnet_openDS1, SEQ ID NO: 5 as parent) mutant Spike (S) protein amino acid sequence
AYTNSFTRGVYYPDKVSMSSVLHSTQDLFLPFFSNVTWFHAIHVSGTNGTKRFDNPVLPFNDGVYFASTEKSNIIRGWIFGTTLDSKTQSLLIVNNATNVVIKVCEFQFCNDPFLGVYYHKNNKSWMESEFRVYSSANNCTFEYVSQPFLMDLEGKQGNFKNLREFVFKNIDGYFKIYSKHTPINLVRDLPQGFSALELLVDLPIGINITRFQTLLALHRSYLTPGDSSSGWTAGAAAYYVGYLQPRTFLLKYNENGVITDAVDCALDPLSETKCTLKSFTVEKGIYITSLFEVQPTESIVRFPNITNLCPFGEVFNATRFASVYAWNRKRISNCVADYSVLYNSASFSTFKCYGVSPTKLNDLCFTNVYADSFVIRGDEVRQIAPGQTGKIADYNYKLPDDFTGCVIAWNSNNLDSKVGGNYNYLYRLFRKSNLKPFERDISTEIYQAGSTPCNGVEGFNCYFPLQSYGFQPTNGVGYQPYRVVVLSFELNHAPATVCGPKKSTNLVKNKCVNFNFNGLTGTGVLTESNLKFVSTQLFRVHSANTTLAVRDPQTLEILDIVSCSSGAVSVITPGTNTSNQVAVLYYNVWCTEVPVAIHADQLTPTWRVYSTGSNVFQTKAGCLIGAEHVNNSYECDIAIGGGICASYQTQTNSPGSASSVASQSIIAYWISTGSWNSVDNSNDAIAIATNFTISVTTEILPVSMTKTWVICTLYICGGSTECSNLLAQYGSFCTELNRALTGCAVEQDKNTWEVFAQVRTIFHTPSIKDFGGFNFSQILPDPSKPSKRSFIEDLLFNKVTLADAGFIKQYGDCLGDIAARDLSCHQDSRGLNILSSLLTDELIAEFTSALLAGTITAGWSFTAGHALNIPWAVQMAWRFAGIGVTENVLAKNQKLIANQFNSAIGKIQDSLSSTASALGKLQDVVNQNAQALDELERELSSNFGAISSVLNDILSNLDPPEAEVQIDRLILGRLMALAAFVTAQLIRCAEIRASANLAATKMAECVAGQSKLVGFCGEGWHLMSFPQSAPHGVVFLHVTLVAGQTKNFTTALAICHDGKAHIPRNGVFVSNGTHWFVTQEQFYEPLIITTDLVLVSGNCDDVIGIVNNTVYDPKQPELDS

SEQ ID NO: 46 - protein, 1121 aa, Artificial Sequence
  Synthetic: (CoV2_S2_1_hbnet_openDS1, SEQ ID NO: 10 as parent) mutant Spike (S) protein amino acid sequence
AYTNSFTRGVYYPDKVFRSSVLHSTQDLFLPFFSNVTWFHAIHVSGTNGTKRFDNPVLPFNDGVYFASTEKSNIIRGWIFGTTLDSKTQSLLIVNNATNVVIKVCEFQFCNDPFLGVYYHKNNKSWMESEFRVYSSANNCTFEYVSQPFLMDLEGKQGNFKNLREFVFKNIDGYFKIYSKHTPINLVRDLPQGFSALEPLVDLPIGINITRFQTLLALHRSYLTPGDSSSGWTAGAAAYYVGYLQPRTFLLKYNENGTITDAVDCALDPLSETKCTLKSFTVEKGIYQTSNFRVQPTESIVRFPNITNLCPFGEVFNATRFASVYAWNRKRISNCVADYSVLYNSASFSTFKCYGVSPTKLNDLCFTNVYADSFVIRGDEVRQIAPGQTGKIADYNYKLPDDFTGCVIAWNSNNLDSKVGGNYNYLYRLFRKSNLKPFERDISTEIYQAGSTPCNGVEGFNCYFPLQSYGFQPTNGVGYQPYRVVVLSFELLHAPATVCGPKKSTNLVKNKCVNFNFNGLTGTGVLTESNKKFLPFQQFGRDIADTTDAVRDPQTLEILDITPCSFGGVSVITPGTNTSNQVAVLYQGVNCTEVPVAIHADQLTPTWRVYSTGSNVFQTRAGCLIGAEHVNNSYECDIPIGAGICASYQTQTNSPGSASSVASQSIIAYQISTGSWNSVENSNDAIAIATNFTISVTTEILPVSMTKTWVDCTLYICGGSTECSNLLAQYGSFCTELNRMLTGCAVEQDKNTWEVFATVRTIFHTPSIKDFGGFNFSQILPDPSKPSKRSFIEDLLFNKVTLADAGFIKQYGDCLGDIAARDSSCAQKANGLNILSSLLTDELIAEFTSALLAGTITAGWSFTAGAALNIPWWAQMAWRFAGIGVTENVLAKNQKLIANQFNSAIGKIQDSLSSTASALGKLQDVVNQNAQALAELEKELSSNFGAISSVLNDILSNLDPPEAEVQIDRLILGRLMALAAFVTAQAIRCAEIRASANLAATKMRECVAGQSKLVGFCGEGWHLMSFPQSAPHGVVFLHVTLVAGQYKNFTTAPAICHDGKAHIPRNGVFVSNGTHWFVTQEQFYEPLIITTDLVLVSGNCDDVIGIVNNTVYDPKQPELDS

SEQ ID NO: 47 - protein, 1121 aa, Artificial Sequence
  Synthetic: (CoV2_S2_NTD_6_pross_openDS1, SEQ ID NO: 24 as parent) mutant Spike (S) protein amino acid sequence
AYTNSFTRGVYYPDKVFRSNVLHLTQDLFLPFFSNVTWFHAIHVSGTNGTKRFDNPVLPFNDGVYFASTEKSNIIRGWIFGTTLDSKTQSLLIVNNATNVVIKVCEFQFCEDPFLGVYYHKNNKSWMESEFHVYSSANNCTFEYVSQPFLMDLEGKQGNFKNLREFVFKNIDGYFKIYSKHTPINLVRDLPQGFSALEPLVDLPIGINITRFQILLALHRSYLTPGDSSSGWTAGAAAYYVGYLQPRTFLLKYNENGTITDAVDCALDPLSETKCTLKSFTVEKGIYQTSNFRVQPTESIVRFPNITNLCPFGEVFNATRFASVYAWNRKRISNCVADYSVLYNSASFSTFKCYGVSPTKLNDLCFTNVYADSFVIRGDEVRQIAPGQTGKIADYNYKLPDDFTGCVIAWNSNNLDSKVGGNYNYLYRLFRKSNLKPFERDISTEIYQAGSTPCNGVEGFNCYFPLQSYGFQPTNGVGYQPYRVVVLSFELLHAPATVCGPKKSTNLVKNKCVNFNFNGLTGTGVLTESNKKFLPFQQFGRDIADTTDAVRDPQTLEILDITPCSFGGVSVITPGTNTSNQVAVLYQGVNCTEVPVAIHADQLTPTWRVYSTGSNVFQTRAGCLIGAEHVNNSYECDIPIGAGICASYQTQTNSPGSASSVASQSIIAYTMSLGAENSVAYSNNSIAIPTNFTISVTTEIIPVSMPKTSVDCTMYICGDSTECSNLLLQYGSFCTQLNRALTECAVEQDKNTQEVFAQVKQIYKTPPIKDFGGFNFSQILPDPSKPSKRSFIEDLLFNKVTLADAGFIKGYGDCLGDIAARDLICAQKFNGLTVLPPLLTDEMIAAYTSALLAGTITAGWTFGAGAALQIPFAMQMAYRFNGIGVTQNVLYENQKLIANQFNKAIGKIQDGLSSTASALGKLQDVVNQNAQALNTLVKQLSSNFGAISSVLNDILSRLDPPEAEVQIDRLINGRLQSLQTYVTQQLIRCAEIRASANLAAEKMSECVLGQSKRVDFCGKGYHLMSFPQSAPHGVVFLHVTYVPTQHKNFTTAPAICHDGKAHFPREGVFVSNGTHWFVTQRNFYEPQIITTDNTFVSGNCDVVIGIVNNTVYDPLQPELDS

SEQ ID NO: 48 - protein, 1121 aa, Artificial Sequence
  Synthetic: (CoV2_S2_6_pross_openDS1, SEQ ID NO: 29 as parent) mutant Spike (S) protein amino acid sequence
AYTNSFTRGVYYPDKVFRSSVLHSTQDLFLPFFSNVTWFHAIHVSGTNGTKRFDNPVLPFNDGVYFASTEKSNIIRGWIFGTTLDSKTQSLLIVNNATNVVIKVCEFQFCNDPFLGVYYHKNNKSWMESEFRVYSSANNCTFEYVSQPFLMDLEGKQGNFKNLREFVFKNIDGYFKIYSKHTPINLVRDLPQGFSALEPLVDLPIGINITRFQTLLALHRSYLTPGDSSSGWTAGAAAYYVGYLQPRTFLLKYNENGTITDAVDCALDPLSETKCTLKSFTVEKGIYQTSNFRVQPTESIVRFPNITNLCPFGEVFNATRFASVYAWNRKRISNCVADYSVLYNSASFSTFKCYGVSPTKLNDLCFTNVYADSFVIRGDEVRQIAPGQTGKIADYNYKLPDDFTGCVIAWNSNNLDSKVGGNYNYLYRLFRKSNLKPFERDISTEIYQAGSTPCNGVEGFNCYFPLQSYGFQPTNGVGYQPYRVVVLSFELLHAPATVCGPKKSTNLVKNKCVNFNFNGLTGTGVLTESNKKFLPFQQFGRDIADTTDAVRDPQTLEILDITPCSFGGVSVITPGTNTSNQVAVLYQGVNCTEVPVAIHADQLTPTWRVYSTGSNVFQTRAGCLIGAEHVNNSYECDIPIGAGICASYQTQTNSPGSASSVASQSIIAYTMSLGAENSVAYSNNSIAIPTNFTISVTTEIIPVSMPKTSVDCTMYICGDSTECSNLLLQYGSFCTQLNRALTECAVEQDKNTQEVFAQVKQIYKTPPIKDFGGFNFSQILPDPSKPSKRSFIEDLLFNKVTLADAGFIKGYGDCLGDIAARDLICAQKFNGLTVLPPLLTDEMIAAYTSALLAGTITAGWTFGAGAALQIPFAMQMAYRFNGIGVTQNVLYENQKLIANQFNKAIGKIQDGLSSTASALGKLQDVVNQNAQALNTLVKQLSSNFGAISSVLNDILSRLDPPEAEVQIDRLINGRLQSLQTYVTQQLIRCAEIRASANLAAEKMSECVLGQSKRVDFCGKGYHLMSFPQSAPHGVVFLHVTYVPTQHKNFTTAPAICHDGKAHFPREGVFVSNGTHWFVTQRNFYEPQIITTDNTFVSGNCDVVIGIVNNTVYDPLQPELDS

SEQ ID NO: 49 - protein, 1121 aa, Artificial Sequence
  Synthetic: (CoV2_S2_1_hbnet_pross_openDS1, SEQ ID NO:  30 as parent) mutant Spike (S) protein amino acid sequence
AYTNSFTRGVYYPDKVFRSSVLHSTQDLFLPFFSNVTWFHAIHVSGTNGTKRFDNPVLPFNDGVYFASTEKSNIIRGWIFGTTLDSKTQSLLIVNNATNVVIKVCEFQFCNDPFLGVYYHKNNKSWMESEFRVYSSANNCTFEYVSQPFLMDLEGKQGNFKNLREFVFKNIDGYFKIYSKHTPINLVRDLPQGFSALEPLVDLPIGINITRFQTLLALHRSYLTPGDSSSGWTAGAAAYYVGYLQPRTFLLKYNENGTITDAVDCALDPLSETKCTLKSFTVEKGIYQTSNFRVQPTESIVRFPNITNLCPFGEVFNATRFASVYAWNRKRISNCVADYSVLYNSASFSTFKCYGVSPTKLNDLCFTNVYADSFVIRGDEVRQIAPGQTGKIADYNYKLPDDFTGCVIAWNSNNLDSKVGGNYNYLYRLFRKSNLKPFERDISTEIYQAGSTPCNGVEGFNCYFPLQSYGFQPTNGVGYQPYRVVVLSFELLHAPATVCGPKKSTNLVKNKCVNFNFNGLTGTGVLTESNKKFLPFQQFGRDIADTTDAVRDPQTLEILDITPCSFGGVSVITPGTNTSNQVAVLYQGVNCTEVPVAIHADQLTPTWRVYSTGSNVFQTRAGCLIGAEHVNNSYECDIPIGAGICASYQTQTNSPGSASSVASQSIIAYTMSLGAENSVAYSNNSIAIATNFTISVTTEILPVSMTKTSVDCTMYICGGSTECSNLLLQYGSFCTQLNRALTECAVEQDKNTQEVFAQVKQIYKTPPIKDFGGFNFSQILPDPSKPSKRSAIEDLLFNKVKLADAGFIKGYGDCLGDIAARDSICAQKFNGLTILSSLLTDEMIAAFTSALLAGTITAGWTFGAGAALQIPFAMQMAYRFAGIGVTQNVLYENQKLIANQFNNAIGKIQDGLSSTASALGKLQDVVNQNAQALNTLVKQLSSNFGAISSVLNDILSNLDPPEAEVQIDRLITGRLQSLQTYVTQQAIRCAEIRASANLAATKMSECVLGQSKLVDFCGKGYHLMSFPQSAPHGVVFLHVTYVATQYKNFTTAPAICHDGKAHFPREGVFVSNGTHWFVTQRNFYEPQIITTDLTFVSGNCDVVIGIVNNTVYDPLQPELDS

SEQ ID NO: 50 - protein, 1121 aa, Artificial Sequence
  Synthetic: (CoV2_S_1_hbnet_openDS2, SEQ ID NO: 5 as parent) mutant Spike (S) protein amino acid sequence
AYTNSFTRGVYYPDKVSMSSVLHSTQDLFLPFFSNVTWFHAIHVSGTNGTKRFDNPVLPFNDGVYFASTEKSNIIRGWIFGTTLDSKTQSLLIVNNATNVVIKVCEFQFCNDPFLGVYYHKNNKSWMESEFRVYSSANNCTFEYVSQPFLMDLEGKQGNFKNLREFVFKNIDGYFKIYSKHTPINLVRDLPQGFSALELLVDLPIGINITRFQTLLALHRSYLTPGDSSSGWTAGAAAYYVGYLQPRTFLLKYNENGVITDAVDCALDPLSETKCTLKSFTVEKGIYITSLFEVQPTESIVRFPNITNLCPFGEVFNATRFASVYAWNRKRISNCVADYSVLYNSASFSTFKCYGVSPTKLNDLCFTNVYADSFVIRGDEVRQIAPGQTGKIADYNYKLPDDFTGCVIAWNSNNLDSKVGGNYNYLYRLFRKSNLKPFERDISTEIYQAGSTPCNGVEGFNCYFPLQSYGFQPTNGVGYQPYRVVVLSFELNHAPATVCGPKKSTNLVKNKCVNFNFNGLTGTGVLTESNLKFVSTQLFRVHSANTTLAVRDPQTLEILDIVSCSSGAVSVITPGTNTSNQVAVLYYNVWCTEVPVAIHADQLTPTWRVYSTGSNVFQTKAGCLIGAEHVNNSYECDIAIGGGICASYQTQTNSPGSASSVASQSIIAYWISTGSWNSVDNSNDAIAIATNFTISVTTEILPVSMTKTWVICTLYICGGSTECSNLLAQYGSFCTELNRALTGIAVEQDKNTWEVFAQVRTIFHTPSIKDFGGFNFSQILPDPSKPSKRSFIEDLLFNKVTLADAGFIKQYGCCLGDIAARDLSCHQDSRGLNILCSLLTDELIAEFTSALLAGTITAGWSFTAGHALNIPWAVQMAWRFAGIGVTENVLAKNQKLIANQFNSAIGKIQDSLSSTASALGKLQDVVNQNAQALDELERELSSNFGAISSVLNDILSNLDPPEAEVQIDRLILGRLMALAAFVTAQLIRAAEIRASANLAATKMAECVAGQSKLVGFCGEGWHLMSFPQSAPHGVVFLHVTLVAGQTKNFTTALAICHDGKAHIPRNGVFVSNGTHWFVTQEQFYEPLIITTDLVLVSGNCDDVIGIVNNTVYDPKQPELDS

SEQ ID NO: 51 - protein, 1121 aa, Artificial Sequence
  Synthetic: (CoV2_S2_1_hbnet_openDS2, SEQ ID NO: 10 as parent) mutant Spike (S) protein amino acid sequence
AYTNSFTRGVYYPDKVFRSSVLHSTQDLFLPFFSNVTWFHAIHVSGTNGTKRFDNPVLPFNDGVYFASTEKSNIIRGWIFGTTLDSKTQSLLIVNNATNVVIKVCEFQFCNDPFLGVYYHKNNKSWMESEFRVYSSANNCTFEYVSQPFLMDLEGKQGNFKNLREFVFKNIDGYFKIYSKHTPINLVRDLPQGFSALEPLVDLPIGINITRFQTLLALHRSYLTPGDSSSGWTAGAAAYYVGYLQPRTFLLKYNENGTITDAVDCALDPLSETKCTLKSFTVEKGIYQTSNFRVQPTESIVRFPNITNLCPFGEVFNATRFASVYAWNRKRISNCVADYSVLYNSASFSTFKCYGVSPTKLNDLCFTNVYADSFVIRGDEVRQIAPGQTGKIADYNYKLPDDFTGCVIAWNSNNLDSKVGGNYNYLYRLFRKSNLKPFERDISTEIYQAGSTPCNGVEGFNCYFPLQSYGFQPTNGVGYQPYRVVVLSFELLHAPATVCGPKKSTNLVKNKCVNFNFNGLTGTGVLTESNKKFLPFQQFGRDIADTTDAVRDPQTLEILDITPCSFGGVSVITPGTNTSNQVAVLYQGVNCTEVPVAIHADQLTPTWRVYSTGSNVFQTRAGCLIGAEHVNNSYECDIPIGAGICASYQTQTNSPGSASSVASQSIIAYQISTGSWNSVENSNDAIAIATNFTISVTTEILPVSMTKTWVDCTLYICGGSTECSNLLAQYGSFCTELNRMLTGIAVEQDKNTWEVFATVRTIFHTPSIKDFGGFNFSQILPDPSKPSKRSFIEDLLFNKVTLADAGFIKQYGCCLGDIAARDSSCAQKANGLNILCSLLTDELIAEFTSALLAGTITAGWSFTAGAALNIPWWAQMAWRFAGIGVTENVLAKNQKLIANQFNSAIGKIQDSLSSTASALGKLQDVVNQNAQALAELEKELSSNFGAISSVLNDILSNLDPPEAEVQIDRLILGRLMALAAFVTAQAIRAAEIRASANLAATKMRECVAGQSKLVGFCGEGWHLMSFPQSAPHGVVFLHVTLVAGQYKNFTTAPAICHDGKAHIPRNGVFVSNGTHWFVTQEQFYEPLIITTDLVLVSGNCDDVIGIVNNTVYDPKQPELDS

SEQ ID NO: 52 - protein, 1121 aa, Artificial Sequence
  Synthetic: (CoV2_S2_NTD_6_pross_openDS2, SEQ ID NO: 24 as parent) mutant Spike (S) protein amino acid sequence
AYTNSFTRGVYYPDKVFRSNVLHLTQDLFLPFFSNVTWFHAIHVSGTNGTKRFDNPVLPFNDGVYFASTEKSNIIRGWIFGTTLDSKTQSLLIVNNATNVVIKVCEFQFCEDPFLGVYYHKNNKSWMESEFHVYSSANNCTFEYVSQPFLMDLEGKQGNFKNLREFVFKNIDGYFKIYSKHTPINLVRDLPQGFSALEPLVDLPIGINITRFQILLALHRSYLTPGDSSSGWTAGAAAYYVGYLQPRTFLLKYNENGTITDAVDCALDPLSETKCTLKSFTVEKGIYQTSNFRVQPTESIVRFPNITNLCPFGEVFNATRFASVYAWNRKRISNCVADYSVLYNSASFSTFKCYGVSPTKLNDLCFTNVYADSFVIRGDEVRQIAPGQTGKIADYNYKLPDDFTGCVIAWNSNNLDSKVGGNYNYLYRLFRKSNLKPFERDISTEIYQAGSTPCNGVEGFNCYFPLQSYGFQPTNGVGYQPYRVVVLSFELLHAPATVCGPKKSTNLVKNKCVNFNFNGLTGTGVLTESNKKFLPFQQFGRDIADTTDAVRDPQTLEILDITPCSFGGVSVITPGTNTSNQVAVLYQGVNCTEVPVAIHADQLTPTWRVYSTGSNVFQTRAGCLIGAEHVNNSYECDIPIGAGICASYQTQTNSPGSASSVASQSIIAYTMSLGAENSVAYSNNSIAIPTNFTISVTTEIIPVSMPKTSVDCTMYICGDSTECSNLLLQYGSFCTQLNRALTEIAVEQDKNTQEVFAQVKQIYKTPPIKDFGGFNFSQILPDPSKPSKRSFIEDLLFNKVTLADAGFIKGYGCCLGDIAARDLICAQKFNGLTVLCPLLTDEMIAAYTSALLAGTITAGWTFGAGAALQIPFAMQMAYRFNGIGVTQNVLYENQKLIANQFNKAIGKIQDGLSSTASALGKLQDVVNQNAQALNTLVKQLSSNFGAISSVLNDILSRLDPPEAEVQIDRLINGRLQSLQTYVTQQLIRAAEIRASANLAAEKMSECVLGQSKRVDFCGKGYHLMSFPQSAPHGVVFLHVTYVPTQHKNFTTAPAICHDGKAHFPREGVFVSNGTHWFVTQRNFYEPQIITTDNTFVSGNCDVVIGIVNNTVYDPLQPELDS

SEQ ID NO: 53 - protein, 1121 aa, Artificial Sequence
  Synthetic: (CoV2_S2_6_pross_openDS2, SEQ ID NO: 29 as parent) mutant Spike (S) protein amino acid sequence
AYTNSFTRGVYYPDKVFRSSVLHSTQDLFLPFFSNVTWFHAIHVSGTNGTKRFDNPVLPFNDGVYFASTEKSNIIRGWIFGTTLDSKTQSLLIVNNATNVVIKVCEFQFCNDPFLGVYYHKNNKSWMESEFRVYSSANNCTFEYVSQPFLMDLEGKQGNFKNLREFVFKNIDGYFKIYSKHTPINLVRDLPQGFSALEPLVDLPIGINITRFQTLLALHRSYLTPGDSSSGWTAGAAAYYVGYLQPRTFLLKYNENGTITDAVDCALDPLSETKCTLKSFTVEKGIYQTSNFRVQPTESIVRFPNITNLCPFGEVFNATRFASVYAWNRKRISNCVADYSVLYNSASFSTFKCYGVSPTKLNDLCFTNVYADSFVIRGDEVRQIAPGQTGKIADYNYKLPDDFTGCVIAWNSNNLDSKVGGNYNYLYRLFRKSNLKPFERDISTEIYQAGSTPCNGVEGFNCYFPLQSYGFQPTNGVGYQPYRVVVLSFELLHAPATVCGPKKSTNLVKNKCVNFNFNGLTGTGVLTESNKKFLPFQQFGRDIADTTDAVRDPQTLEILDITPCSFGGVSVITPGTNTSNQVAVLYQGVNCTEVPVAIHADQLTPTWRVYSTGSNVFQTRAGCLIGAEHVNNSYECDIPIGAGICASYQTQTNSPGSASSVASQSIIAYTMSLGAENSVAYSNNSIAIPTNFTISVTTEIIPVSMPKTSVDCTMYICGDSTECSNLLLQYGSFCTQLNRALTEIAVEQDKNTQEVFAQVKQIYKTPPIKDFGGFNFSQILPDPSKPSKRSFIEDLLFNKVTLADAGFIKGYGCCLGDIAARDLICAQKFNGLTVLCPLLTDEMIAAYTSALLAGTITAGWTFGAGAALQIPFAMQMAYRFNGIGVTQNVLYENQKLIANQFNKAIGKIQDGLSSTASALGKLQDVVNQNAQALNTLVKQLSSNFGAISSVLNDILSRLDPPEAEVQIDRLINGRLQSLQTYVTQQLIRAAEIRASANLAAEKMSECVLGQSKRVDFCGKGYHLMSFPQSAPHGVVFLHVTYVPTQHKNFTTAPAICHDGKAHFPREGVFVSNGTHWFVTQRNFYEPQIITTDNTFVSGNCDVVIGIVNNTVYDPLQPELDS

SEQ ID NO: 54 - protein, 1121 aa, Artificial Sequence
  Synthetic: (CoV2_S2_1_hbnet_pross_openDS2, SEQ ID NO: 30 as parent) mutant Spike (S) protein amino acid sequence
AYTNSFTRGVYYPDKVFRSSVLHSTQDLFLPFFSNVTWFHAIHVSGTNGTKRFDNPVLPFNDGVYFASTEKSNIIRGWIFGTTLDSKTQSLLIVNNATNVVIKVCEFQFCNDPFLGVYYHKNNKSWMESEFRVYSSANNCTFEYVSQPFLMDLEGKQGNFKNLREFVFKNIDGYFKIYSKHTPINLVRDLPQGFSALEPLVDLPIGINITRFQTLLALHRSYLTPGDSSSGWTAGAAAYYVGYLQPRTFLLKYNENGTITDAVDCALDPLSETKCTLKSFTVEKGIYQTSNFRVQPTESIVRFPNITNLCPFGEVFNATRFASVYAWNRKRISNCVADYSVLYNSASFSTFKCYGVSPTKLNDLCFTNVYADSFVIRGDEVRQIAPGQTGKIADYNYKLPDDFTGCVIAWNSNNLDSKVGGNYNYLYRLFRKSNLKPFERDISTEIYQAGSTPCNGVEGFNCYFPLQSYGFQPTNGVGYQPYRVVVLSFELLHAPATVCGPKKSTNLVKNKCVNFNFNGLTGTGVLTESNKKFLPFQQFGRDIADTTDAVRDPQTLEILDITPCSFGGVSVITPGTNTSNQVAVLYQGVNCTEVPVAIHADQLTPTWRVYSTGSNVFQTRAGCLIGAEHVNNSYECDIPIGAGICASYQTQTNSPGSASSVASQSIIAYTMSLGAENSVAYSNNSIAIATNFTISVTTEILPVSMTKTSVDCTMYICGGSTECSNLLLQYGSFCTQLNRALTEIAVEQDKNTQEVFAQVKQIYKTPPIKDFGGFNFSQILPDPSKPSKRSAIEDLLFNKVKLADAGFIKGYGCCLGDIAARDSICAQKFNGLTILCSLLTDEMIAAFTSALLAGTITAGWTFGAGAALQIPFAMQMAYRFAGIGVTQNVLYENQKLIANQFNNAIGKIQDGLSSTASALGKLQDVVNQNAQALNTLVKQLSSNFGAISSVLNDILSNLDPPEAEVQIDRLITGRLQSLQTYVTQQAIRAAEIRASANLAATKMSECVLGQSKLVDFCGKGYHLMSFPQSAPHGVVFLHVTYVATQYKNFTTAPAICHDGKAHFPREGVFVSNGTHWFVTQRNFYEPQIITTDLTFVSGNCDVVIGIVNNTVYDPLQPELDS

SEQ ID NO: 55 - protein, 1121 aa, Artificial Sequence
  Synthetic: (CoV2_S_1_hbnet_openDS3, SEQ ID NO: 5 as parent) mutant Spike (S) protein amino acid sequence
AYTNSFTRGVYYPDKVSMSSVLHSTQDLFLPFFSNVTWFHAIHVSGTNGTKRFDNPVLPFNDGVYFASTEKSNIIRGWIFGTTLDSKTQSLLIVNNATNVVIKVCEFQFCNDPFLGVYYHKNNKSWMESEFRVYSSANNCTFEYVSQPFLMDLEGKQGNFKNLREFVFKNIDGYFKIYSKHTPINLVRDLPQGFSALELLVDLPIGINITRFQTLLALHRSYLTPGDSSSGWTAGAAAYYVGYLQPRTFLLKYNENGVITDAVDCALDPLSETKCTLKSFTVEKGIYITSLFEVQPTESIVRFPNITNLCPFGEVFNATRFASVYAWNRKRISNCVADYSVLYNSASFSTFKCYGVSPTKLNDLCFTNVYADSFVIRGDEVRQIAPGQTGKIADYNYKLPDDFTGCVIAWNSNNLDSKVGGNYNYLYRLFRKSNLKPFERDISTEIYQAGSTPCNGVEGFNCYFPLQSYGFQPTNGVGYQPYRVVVLSFELNHAPATVCGPKKSTNLVKNKCVNFNFNGLTGTGVLTESNLKFVSTQLFRVHSCNTTLAVRDPQTLEILDIVSCSSGAVSVITPGTNTSNQVAVLYYNVWCTEVPVAIHADQLTPTWRVYSTGSNVFQTKAGCLIGAEHVNNSYECDIAIGGGICASYQTQTNSPGSASSVASQSIIAYWISTGSWNSVDNSNDAIAIATNFTISVTTEILPVSMTKTWVICTLYICGGSTECSNLLAQYGSFCTELNRALTGIAVEQDKNTWEVFAQVRTIFHTPSIKDFGGFNFSQILPDPSKPSKRSFIEDLLFNKVTLADAGFIKQYGDCLGDIAARDLSCHQDSRGLNILSSLLTDELIAEFTSALLAGTITAGWSFTAGHALNIPWAVQMAWRFAGIGVTENVLAKNQKLIANQFNSAIGKIQDSLSSTASALGKLQDVVNQNAQALDELERELCSNFGAISSVLNDILSNLDPPEAEVQIDRLILGRLMALAAFVTAQLIRAAEIRASANLAATKMAECVAGQSKLVGFCGEGWHLMSFPQSAPHGVVFLHVTLVAGQTKNFTTALAICHDGKAHIPRNGVFVSNGTHWFVTQEQFYEPLIITTDLVLVSGNCDDVIGIVNNTVYDPKQPELDS

SEQ ID NO: 56 - protein, 1121 aa, Artificial Sequence
  Synthetic: (CoV2_S2_1_hbnet_openDS3, SEQ ID NO: 10 as parent) mutant Spike (S) protein amino acid sequence
AYTNSFTRGVYYPDKVFRSSVLHSTQDLFLPFFSNVTWFHAIHVSGTNGTKRFDNPVLPFNDGVYFASTEKSNIIRGWIFGTTLDSKTQSLLIVNNATNVVIKVCEFQFCNDPFLGVYYHKNNKSWMESEFRVYSSANNCTFEYVSQPFLMDLEGKQGNFKNLREFVFKNIDGYFKIYSKHTPINLVRDLPQGFSALEPLVDLPIGINITRFQTLLALHRSYLTPGDSSSGWTAGAAAYYVGYLQPRTFLLKYNENGTITDAVDCALDPLSETKCTLKSFTVEKGIYQTSNFRVQPTESIVRFPNITNLCPFGEVFNATRFASVYAWNRKRISNCVADYSVLYNSASFSTFKCYGVSPTKLNDLCFTNVYADSFVIRGDEVRQIAPGQTGKIADYNYKLPDDFTGCVIAWNSNNLDSKVGGNYNYLYRLFRKSNLKPFERDISTEIYQAGSTPCNGVEGFNCYFPLQSYGFQPTNGVGYQPYRVVVLSFELLHAPATVCGPKKSTNLVKNKCVNFNFNGLTGTGVLTESNKKFLPFQQFGRDICDTTDAVRDPQTLEILDITPCSFGGVSVITPGTNTSNQVAVLYQGVNCTEVPVAIHADQLTPTWRVYSTGSNVFQTRAGCLIGAEHVNNSYECDIPIGAGICASYQTQTNSPGSASSVASQSIIAYQISTGSWNSVENSNDAIAIATNFTISVTTEILPVSMTKTWVDCTLYICGGSTECSNLLAQYGSFCTELNRMLTGIAVEQDKNTWEVFATVRTIFHTPSIKDFGGFNFSQILPDPSKPSKRSFIEDLLFNKVTLADAGFIKQYGDCLGDIAARDSSCAQKANGLNILSSLLTDELIAEFTSALLAGTITAGWSFTAGAALNIPWWAQMAWRFAGIGVTENVLAKNQKLIANQFNSAIGKIQDSLSSTASALGKLQDVVNQNAQALAELEKELCSNFGAISSVLNDILSNLDPPEAEVQIDRLILGRLMALAAFVTAQAIRAAEIRASANLAATKMRECVAGQSKLVGFCGEGWHLMSFPQSAPHGVVFLHVTLVAGQYKNFTTAPAICHDGKAHIPRNGVFVSNGTHWFVTQEQFYEPLIITTDLVLVSGNCDDVIGIVNNTVYDPKQPELDS

SEQ ID NO: 57 - protein, 1121 aa, Artificial Sequence
  Synthetic: (CoV2_S2_NTD_6_pross_openDS3, SEQ ID NO: 24 as parent) mutant Spike (S) protein amino acid sequence
AYTNSFTRGVYYPDKVFRSNVLHLTQDLFLPFFSNVTWFHAIHVSGTNGTKRFDNPVLPFNDGVYFASTEKSNIIRGWIFGTTLDSKTQSLLIVNNATNVVIKVCEFQFCEDPFLGVYYHKNNKSWMESEFHVYSSANNCTFEYVSQPFLMDLEGKQGNFKNLREFVFKNIDGYFKIYSKHTPINLVRDLPQGFSALEPLVDLPIGINITRFQILLALHRSYLTPGDSSSGWTAGAAAYYVGYLQPRTFLLKYNENGTITDAVDCALDPLSETKCTLKSFTVEKGIYQTSNFRVQPTESIVRFPNITNLCPFGEVFNATRFASVYAWNRKRISNCVADYSVLYNSASFSTFKCYGVSPTKLNDLCFTNVYADSFVIRGDEVRQIAPGQTGKIADYNYKLPDDFTGCVIAWNSNNLDSKVGGNYNYLYRLFRKSNLKPFERDISTEIYQAGSTPCNGVEGFNCYFPLQSYGFQPTNGVGYQPYRVVVLSFELLHAPATVCGPKKSTNLVKNKCVNFNFNGLTGTGVLTESNKKFLPFQQFGRDICDTTDAVRDPQTLEILDITPCSFGGVSVITPGTNTSNQVAVLYQGVNCTEVPVAIHADQLTPTWRVYSTGSNVFQTRAGCLIGAEHVNNSYECDIPIGAGICASYQTQTNSPGSASSVASQSIIAYTMSLGAENSVAYSNNSIAIPTNFTISVTTEIIPVSMPKTSVDCTMYICGDSTECSNLLLQYGSFCTQLNRALTEIAVEQDKNTQEVFAQVKQIYKTPPIKDFGGFNFSQILPDPSKPSKRSFIEDLLFNKVTLADAGFIKGYGDCLGDIAARDLICAQKFNGLTVLPPLLTDEMIAAYTSALLAGTITAGWTFGAGAALQIPFAMQMAYRFNGIGVTQNVLYENQKLIANQFNKAIGKIQDGLSSTASALGKLQDVVNQNAQALNTLVKQLCSNFGAISSVLNDILSRLDPPEAEVQIDRLINGRLQSLQTYVTQQLIRAAEIRASANLAAEKMSECVLGQSKRVDFCGKGYHLMSFPQSAPHGVVFLHVTYVPTQHKNFTTAPAICHDGKAHFPREGVFVSNGTHWFVTQRNFYEPQIITTDNTFVSGNCDVVIGIVNNTVYDPLQPELDS

SEQ ID NO: 58 - protein, 1121 aa, Artificial Sequence
  Synthetic: (CoV2_S2_6_pross_openDS3, SEQ ID NO: 29 as parent) mutant Spike (S) protein amino acid sequence
AYTNSFTRGVYYPDKVFRSSVLHSTQDLFLPFFSNVTWFHAIHVSGTNGTKRFDNPVLPFNDGVYFASTEKSNIIRGWIFGTTLDSKTQSLLIVNNATNVVIKVCEFQFCNDPFLGVYYHKNNKSWMESEFRVYSSANNCTFEYVSQPFLMDLEGKQGNFKNLREFVFKNIDGYFKIYSKHTPINLVRDLPQGFSALEPLVDLPIGINITRFQTLLALHRSYLTPGDSSSGWTAGAAAYYVGYLQPRTFLLKYNENGTITDAVDCALDPLSETKCTLKSFTVEKGIYQTSNFRVQPTESIVRFPNITNLCPFGEVFNATRFASVYAWNRKRISNCVADYSVLYNSASFSTFKCYGVSPTKLNDLCFTNVYADSFVIRGDEVRQIAPGQTGKIADYNYKLPDDFTGCVIAWNSNNLDSKVGGNYNYLYRLFRKSNLKPFERDISTEIYQAGSTPCNGVEGFNCYFPLQSYGFQPTNGVGYQPYRVVVLSFELLHAPATVCGPKKSTNLVKNKCVNFNFNGLTGTGVLTESNKKFLPFQQFGRDICDTTDAVRDPQTLEILDITPCSFGGVSVITPGTNTSNQVAVLYQGVNCTEVPVAIHADQLTPTWRVYSTGSNVFQTRAGCLIGAEHVNNSYECDIPIGAGICASYQTQTNSPGSASSVASQSIIAYTMSLGAENSVAYSNNSIAIPTNFTISVTTEIIPVSMPKTSVDCTMYICGDSTECSNLLLQYGSFCTQLNRALTEIAVEQDKNTQEVFAQVKQIYKTPPIKDFGGFNFSQILPDPSKPSKRSFIEDLLFNKVTLADAGFIKGYGDCLGDIAARDLICAQKFNGLTVLPPLLTDEMIAAYTSALLAGTITAGWTFGAGAALQIPFAMQMAYRFNGIGVTQNVLYENQKLIANQFNKAIGKIQDGLSSTASALGKLQDVVNQNAQALNTLVKQLCSNFGAISSVLNDILSRLDPPEAEVQIDRLINGRLQSLQTYVTQQLIRAAEIRASANLAAEKMSECVLGQSKRVDFCGKGYHLMSFPQSAPHGVVFLHVTYVPTQHKNFTTAPAICHDGKAHFPREGVFVSNGTHWFVTQRNFYEPQIITTDNTFVSGNCDVVIGIVNNTVYDPLQPELDS

SEQ ID NO: 59 - protein, 1121 aa, Artificial Sequence
  Synthetic: (CoV2_S2_1_hbnet_pross_openDS3, SEQ ID NO: 30 as parent) mutant Spike (S) protein amino acid sequence
AYTNSFTRGVYYPDKVFRSSVLHSTQDLFLPFFSNVTWFHAIHVSGTNGTKRFDNPVLPFNDGVYFASTEKSNIIRGWIFGTTLDSKTQSLLIVNNATNVVIKVCEFQFCNDPFLGVYYHKNNKSWMESEFRVYSSANNCTFEYVSQPFLMDLEGKQGNFKNLREFVFKNIDGYFKIYSKHTPINLVRDLPQGFSALEPLVDLPIGINITRFQTLLALHRSYLTPGDSSSGWTAGAAAYYVGYLQPRTFLLKYNENGTITDAVDCALDPLSETKCTLKSFTVEKGIYQTSNFRVQPTESIVRFPNITNLCPFGEVFNATRFASVYAWNRKRISNCVADYSVLYNSASFSTFKCYGVSPTKLNDLCFTNVYADSFVIRGDEVRQIAPGQTGKIADYNYKLPDDFTGCVIAWNSNNLDSKVGGNYNYLYRLFRKSNLKPFERDISTEIYQAGSTPCNGVEGFNCYFPLQSYGFQPTNGVGYQPYRVVVLSFELLHAPATVCGPKKSTNLVKNKCVNFNFNGLTGTGVLTESNKKFLPFQQFGRDICDTTDAVRDPQTLEILDITPCSFGGVSVITPGTNTSNQVAVLYQGVNCTEVPVAIHADQLTPTWRVYSTGSNVFQTRAGCLIGAEHVNNSYECDIPIGAGICASYQTQTNSPGSASSVASQSIIAYTMSLGAENSVAYSNNSIAIATNFTISVTTEILPVSMTKTSVDCTMYICGGSTECSNLLLQYGSFCTQLNRALTEIAVEQDKNTQEVFAQVKQIYKTPPIKDFGGFNFSQILPDPSKPSKRSAIEDLLFNKVKLADAGFIKGYGDCLGDIAARDSICAQKFNGLTILSSLLTDEMIAAFTSALLAGTITAGWTFGAGAALQIPFAMQMAYRFAGIGVTQNVLYENQKLIANQFNNAIGKIQDGLSSTASALGKLQDVVNQNAQALNTLVKQLCSNFGAISSVLNDILSNLDPPEAEVQIDRLITGRLQSLQTYVTQQAIRAAEIRASANLAATKMSECVLGQSKLVDFCGKGYHLMSFPQSAPHGVVFLHVTYVATQYKNFTTAPAICHDGKAHFPREGVFVSNGTHWFVTQRNFYEPQIITTDLTFVSGNCDVVIGIVNNTVYDPLQPELDS

SEQ ID NO: 60 - protein, 1121 aa, Artificial Sequence
  Synthetic: (CoV2_S_1_hbnet_openDS4, SEQ ID NO: 5 as parent) mutant Spike (S) protein amino acid sequence
AYTNSFTRGVYYPDKVSMSSVLHSTQDLFLPFFSNVTWFHAIHVSGTNGTKRFDNPVLPFNDGVYFASTEKSNIIRGWIFGTTLDSKTQSLLIVNNATNVVIKVCEFQFCNDPFLGVYYHKNNKSWMESEFRVYSSANNCTFEYVSQPFLMDLEGKQGNFKNLREFVFKNIDGYFKIYSKHTPINLVRDLPQGFSALELLVDLPIGINITRFQTLLALHRSYLTPGDSSSGWTAGAAAYYVGYLQPRTFLLKYNENGVITDAVDCALDPLSETKCTLKSFTVEKGIYITSLFEVQPTESIVRFPNITNLCPFGEVFNATRFASVYAWNRKRISNCVADYSVLYNSASFSTFKCYGVSPTKLNDLCFTNVYADSFVIRGDEVRQIAPGQTGKIADYNYKLPDDFTGCVIAWNSNNLDSKVGGNYNYLYRLFRKSNLKPFERDISTEIYQAGSTPCNGVEGFNCYFPLQSYGFQPTNGVGYQPYRVVVLSFELNHAPATVCGPKKSTNLVKNKCVNFNFNGLTGTGVLTESNLKFVSTQLFRVHSANTTLAVRDPQTLEILCIVSCSSGAVSVITPGTNTSNQVAVLYYNVWCTEVPVAIHADQLTPTWRVYSTGSNVFQTKAGCLIGAEHVNNSYECDIAIGGGICASYQTQTNSPGSASSVASQSIIAYWISTGSWNSVDNSNDAIAIATNFTISVTTEILPVSMTKTWVICTLYICGGSTECSNLLAQYGSFCTELNRALTGIAVEQDKNTWEVFAQVRTIFHTPSIKDFGGFNFSQILPDPSKPSKRSFIEDLLFNKVTLADAGFIKQYGDCLGDIAARDLCCHQDSRGLNILSSLLTDELIAEFTSALLAGTITAGWSFTAGHALNIPWAVQMAWRFAGIGVTENVLAKNQKLIANQFNSAIGKIQDSLSSTASALGKLQDVVNQNAQALDELERELSSNFGAISSVLNDILSNLDPPEAEVQIDRLILGRLMALAAFVTAQLIRAAEIRASANLAATKMAECVAGQSKLVGFCGEGWHLMSFPQSAPHGVVFLHVTLVAGQTKNFTTALAICHDGKAHIPRNGVFVSNGTHWFVTQEQFYEPLIITTDLVLVSGNCDDVIGIVNNTVYDPKQPELDS

SEQ ID NO: 61 - protein, 1121 aa, Artificial Sequence
  Synthetic: (CoV2_S2_1_hbnet_openDS4, SEQ ID NO: 10 as parent) mutant Spike (S) protein amino acid sequence
AYTNSFTRGVYYPDKVFRSSVLHSTQDLFLPFFSNVTWFHAIHVSGTNGTKRFDNPVLPFNDGVYFASTEKSNIIRGWIFGTTLDSKTQSLLIVNNATNVVIKVCEFQFCNDPFLGVYYHKNNKSWMESEFRVYSSANNCTFEYVSQPFLMDLEGKQGNFKNLREFVFKNIDGYFKIYSKHTPINLVRDLPQGFSALEPLVDLPIGINITRFQTLLALHRSYLTPGDSSSGWTAGAAAYYVGYLQPRTFLLKYNENGTITDAVDCALDPLSETKCTLKSFTVEKGIYQTSNFRVQPTESIVRFPNITNLCPFGEVFNATRFASVYAWNRKRISNCVADYSVLYNSASFSTFKCYGVSPTKLNDLCFTNVYADSFVIRGDEVRQIAPGQTGKIADYNYKLPDDFTGCVIAWNSNNLDSKVGGNYNYLYRLFRKSNLKPFERDISTEIYQAGSTPCNGVEGFNCYFPLQSYGFQPTNGVGYQPYRVVVLSFELLHAPATVCGPKKSTNLVKNKCVNFNFNGLTGTGVLTESNKKFLPFQQFGRDIADTTDAVRDPQTLEILCITPCSFGGVSVITPGTNTSNQVAVLYQGVNCTEVPVAIHADQLTPTWRVYSTGSNVFQTRAGCLIGAEHVNNSYECDIPIGAGICASYQTQTNSPGSASSVASQSIIAYQISTGSWNSVENSNDAIAIATNFTISVTTEILPVSMTKTWVDCTLYICGGSTECSNLLAQYGSFCTELNRMLTGIAVEQDKNTWEVFATVRTIFHTPSIKDFGGFNFSQILPDPSKPSKRSFIEDLLFNKVTLADAGFIKQYGDCLGDIAARDSCCAQKANGLNILSSLLTDELIAEFTSALLAGTITAGWSFTAGAALNIPWWAQMAWRFAGIGVTENVLAKNQKLIANQFNSAIGKIQDSLSSTASALGKLQDVVNQNAQALAELEKELSSNFGAISSVLNDILSNLDPPEAEVQIDRLILGRLMALAAFVTAQAIRAAEIRASANLAATKMRECVAGQSKLVGFCGEGWHLMSFPQSAPHGVVFLHVTLVAGQYKNFTTAPAICHDGKAHIPRNGVFVSNGTHWFVTQEQFYEPLIITTDLVLVSGNCDDVIGIVNNTVYDPKQPELDS

SEQ ID NO: 62 - protein, 1121 aa, Artificial Sequence
  Synthetic: (CoV2_S2_NTD_6_pross_openDS4, SEQ ID NO: 24 as parent) mutant Spike (S) protein amino acid sequence
AYTNSFTRGVYYPDKVFRSNVLHLTQDLFLPFFSNVTWFHAIHVSGTNGTKRFDNPVLPFNDGVYFASTEKSNIIRGWIFGTTLDSKTQSLLIVNNATNVVIKVCEFQFCEDPFLGVYYHKNNKSWMESEFHVYSSANNCTFEYVSQPFLMDLEGKQGNFKNLREFVFKNIDGYFKIYSKHTPINLVRDLPQGFSALEPLVDLPIGINITRFQILLALHRSYLTPGDSSSGWTAGAAAYYVGYLQPRTFLLKYNENGTITDAVDCALDPLSETKCTLKSFTVEKGIYQTSNFRVQPTESIVRFPNITNLCPFGEVFNATRFASVYAWNRKRISNCVADYSVLYNSASFSTFKCYGVSPTKLNDLCFTNVYADSFVIRGDEVRQIAPGQTGKIADYNYKLPDDFTGCVIAWNSNNLDSKVGGNYNYLYRLFRKSNLKPFERDISTEIYQAGSTPCNGVEGFNCYFPLQSYGFQPTNGVGYQPYRVVVLSFELLHAPATVCGPKKSTNLVKNKCVNFNFNGLTGTGVLTESNKKFLPFQQFGRDIADTTDAVRDPQTLEILCITPCSFGGVSVITPGTNTSNQVAVLYQGVNCTEVPVAIHADQLTPTWRVYSTGSNVFQTRAGCLIGAEHVNNSYECDIPIGAGICASYQTQTNSPGSASSVASQSIIAYTMSLGAENSVAYSNNSIAIPTNFTISVTTEIIPVSMPKTSVDCTMYICGDSTECSNLLLQYGSFCTQLNRALTEIAVEQDKNTQEVFAQVKQIYKTPPIKDFGGFNFSQILPDPSKPSKRSFIEDLLFNKVTLADAGFIKGYGDCLGDIAARDLCCAQKFNGLTVLPPLLTDEMIAAYTSALLAGTITAGWTFGAGAALQIPFAMQMAYRFNGIGVTQNVLYENQKLIANQFNKAIGKIQDGLSSTASALGKLQDVVNQNAQALNTLVKQLSSNFGAISSVLNDILSRLDPPEAEVQIDRLINGRLQSLQTYVTQQLIRAAEIRASANLAAEKMSECVLGQSKRVDFCGKGYHLMSFPQSAPHGVVFLHVTYVPTQHKNFTTAPAICHDGKAHFPREGVFVSNGTHWFVTQRNFYEPQIITTDNTFVSGNCDVVIGIVNNTVYDPLQPELDS

SEQ ID NO: 63 - protein, 1121 aa, Artificial Sequence
  Synthetic: (CoV2_S2_6_pross_openDS4, SEQ ID NO: 29 as parent) mutant Spike (S) protein amino acid sequence
AYTNSFTRGVYYPDKVFRSSVLHSTQDLFLPFFSNVTWFHAIHVSGTNGTKRFDNPVLPFNDGVYFASTEKSNIIRGWIFGTTLDSKTQSLLIVNNATNVVIKVCEFQFCNDPFLGVYYHKNNKSWMESEFRVYSSANNCTFEYVSQPFLMDLEGKQGNFKNLREFVFKNIDGYFKIYSKHTPINLVRDLPQGFSALEPLVDLPIGINITRFQTLLALHRSYLTPGDSSSGWTAGAAAYYVGYLQPRTFLLKYNENGTITDAVDCALDPLSETKCTLKSFTVEKGIYQTSNFRVQPTESIVRFPNITNLCPFGEVFNATRFASVYAWNRKRISNCVADYSVLYNSASFSTFKCYGVSPTKLNDLCFTNVYADSFVIRGDEVRQIAPGQTGKIADYNYKLPDDFTGCVIAWNSNNLDSKVGGNYNYLYRLFRKSNLKPFERDISTEIYQAGSTPCNGVEGFNCYFPLQSYGFQPTNGVGYQPYRVVVLSFELLHAPATVCGPKKSTNLVKNKCVNFNFNGLTGTGVLTESNKKFLPFQQFGRDIADTTDAVRDPQTLEILCITPCSFGGVSVITPGTNTSNQVAVLYQGVNCTEVPVAIHADQLTPTWRVYSTGSNVFQTRAGCLIGAEHVNNSYECDIPIGAGICASYQTQTNSPGSASSVASQSIIAYTMSLGAENSVAYSNNSIAIPTNFTISVTTEIIPVSMPKTSVDCTMYICGDSTECSNLLLQYGSFCTQLNRALTEIAVEQDKNTQEVFAQVKQIYKTPPIKDFGGFNFSQILPDPSKPSKRSFIEDLLFNKVTLADAGFIKGYGDCLGDIAARDLCCAQKFNGLTVLPPLLTDEMIAAYTSALLAGTITAGWTFGAGAALQIPFAMQMAYRFNGIGVTQNVLYENQKLIANQFNKAIGKIQDGLSSTASALGKLQDVVNQNAQALNTLVKQLSSNFGAISSVLNDILSRLDPPEAEVQIDRLINGRLQSLQTYVTQQLIRAAEIRASANLAAEKMSECVLGQSKRVDFCGKGYHLMSFPQSAPHGVVFLHVTYVPTQHKNFTTAPAICHDGKAHFPREGVFVSNGTHWFVTQRNFYEPQIITTDNTFVSGNCDVVIGIVNNTVYDPLQPELDS

SEQ ID NO: 64 - protein, 1121 aa, Artificial Sequence
  Synthetic: (CoV2_S2_1_hbnet_pross_openDS4, SEQ ID NO: 30 as parent) mutant Spike (S) protein amino acid sequence
AYTNSFTRGVYYPDKVFRSSVLHSTQDLFLPFFSNVTWFHAIHVSGTNGTKRFDNPVLPFNDGVYFASTEKSNIIRGWIFGTTLDSKTQSLLIVNNATNVVIKVCEFQFCNDPFLGVYYHKNNKSWMESEFRVYSSANNCTFEYVSQPFLMDLEGKQGNFKNLREFVFKNIDGYFKIYSKHTPINLVRDLPQGFSALEPLVDLPIGINITRFQTLLALHRSYLTPGDSSSGWTAGAAAYYVGYLQPRTFLLKYNENGTITDAVDCALDPLSETKCTLKSFTVEKGIYQTSNFRVQPTESIVRFPNITNLCPFGEVFNATRFASVYAWNRKRISNCVADYSVLYNSASFSTFKCYGVSPTKLNDLCFTNVYADSFVIRGDEVRQIAPGQTGKIADYNYKLPDDFTGCVIAWNSNNLDSKVGGNYNYLYRLFRKSNLKPFERDISTEIYQAGSTPCNGVEGFNCYFPLQSYGFQPTNGVGYQPYRVVVLSFELLHAPATVCGPKKSTNLVKNKCVNFNFNGLTGTGVLTESNKKFLPFQQFGRDIADTTDAVRDPQTLEILCITPCSFGGVSVITPGTNTSNQVAVLYQGVNCTEVPVAIHADQLTPTWRVYSTGSNVFQTRAGCLIGAEHVNNSYECDIPIGAGICASYQTQTNSPGSASSVASQSIIAYTMSLGAENSVAYSNNSIAIATNFTISVTTEILPVSMTKTSVDCTMYICGGSTECSNLLLQYGSFCTQLNRALTEIAVEQDKNTQEVFAQVKQIYKTPPIKDFGGFNFSQILPDPSKPSKRSAIEDLLFNKVKLADAGFIKGYGDCLGDIAARDSCCAQKFNGLTILSSLLTDEMIAAFTSALLAGTITAGWTFGAGAALQIPFAMQMAYRFAGIGVTQNVLYENQKLIANQFNNAIGKIQDGLSSTASALGKLQDVVNQNAQALNTLVKQLSSNFGAISSVLNDILSNLDPPEAEVQIDRLITGRLQSLQTYVTQQAIRAAEIRASANLAATKMSECVLGQSKLVDFCGKGYHLMSFPQSAPHGVVFLHVTYVATQYKNFTTAPAICHDGKAHFPREGVFVSNGTHWFVTQRNFYEPQIITTDLTFVSGNCDVVIGIVNNTVYDPLQPELDS

SEQ ID NO: 65 - protein, 1121 aa, Artificial Sequence
  Synthetic: (CoV2_RBD_K417F_K391F) mutant Spike (S) protein amino acid sequence
AYTNSFTRGVYYPDKVFRSSVLHSTQDLFLPFFSNVTWFHAIHVSGTNGTKRFDNPVLPFNDGVYFASTEKSNIIRGWIFGTTLDSKTQSLLIVNNATNVVIKVCEFQFCNDPFLGVYYHKNNKSWMESEFRVYSSANNCTFEYVSQPFLMDLEGKQGNFKNLREFVFKNIDGYFKIYSKHTPINLVRDLPQGFSALEPLVDLPIGINITRFQTLLALHRSYLTPGDSSSGWTAGAAAYYVGYLQPRTFLLKYNENGTITDAVDCALDPLSETKCTLKSFTVEKGIYQTSNFRVQPTESIVRFPNITNLCPFGEVFNATRFASVYAWNRKRISNCVADYSVLYNSASFSTFKCYGVSPTKLNDLCFTNVYADSFVIRGDEVRQIAPGQTGFIADYNYKLPDDFTGCVIAWNSNNLDSKVGGNYNYLYRLFRKSNLKPFERDISTEIYQAGSTPCNGVEGFNCYFPLQSYGFQPTNGVGYQPYRVVVLSFELLHAPATVCGPKKSTNLVKNKCVNFNFNGLTGTGVLTESNKKFLPFQQFGRDIADTTDAVRDPQTLEILDITPCSFGGVSVITPGTNTSNQVAVLYQGVNCTEVPVAIHADQLTPTWRVYSTGSNVFQTRAGCLIGAEHVNNSYECDIPIGAGICASYQTQTNSPGSASSVASQSIIAYTMSLGAENSVAYSNNSIAIPTNFTISVTTEILPVSMTKTSVDCTMYICGDSTECSNLLLQYGSFCTQLNRALTGIAVEQDKNTQEVFAQVKQIYKTPPIKDFGGFNFSQILPDPSKPSKRSFIEDLLFNKVTLADAGFIKQYGDCLGDIAARDLICAQKFNGLTVLPPLLTDEMIAQYTSALLAGTITSGWTFGAGAALQIPFAMQMAYRFNGIGVTQNVLYENQKLIANQFNSAIGKIQDSLSSTASALGKLQDVVNQNAQALNTLVKQLSSNFGAISSVLNDILSRLDPPEAEVQIDRLITGRLQSLQTYVTQQLIRAAEIRASANLAATKMSECVLGQSKRVDFCGKGYHLMSFPQSAPHGVVFLHVTYVPAQEKNFTTAPAICHDGKAHFPREGVFVSNGTHWFVTQRNFYEPQIITTDNTFVSGNCDVVIGIVNNTVYDPLQPELDS

SEQ ID NO: 66 - protein, 1121 aa, Artificial Sequence
  Synthetic: (CoV2_RBD_K417L_K391L) mutant Spike (S) protein amino acid sequence
AYTNSFTRGVYYPDKVFRSSVLHSTQDLFLPFFSNVTWFHAIHVSGTNGTKRFDNPVLPFNDGVYFASTEKSNIIRGWIFGTTLDSKTQSLLIVNNATNVVIKVCEFQFCNDPFLGVYYHKNNKSWMESEFRVYSSANNCTFEYVSQPFLMDLEGKQGNFKNLREFVFKNIDGYFKIYSKHTPINLVRDLPQGFSALEPLVDLPIGINITRFQTLLALHRSYLTPGDSSSGWTAGAAAYYVGYLQPRTFLLKYNENGTITDAVDCALDPLSETKCTLKSFTVEKGIYQTSNFRVQPTESIVRFPNITNLCPFGEVFNATRFASVYAWNRKRISNCVADYSVLYNSASFSTFKCYGVSPTKLNDLCFTNVYADSFVIRGDEVRQIAPGQTGLIADYNYKLPDDFTGCVIAWNSNNLDSKVGGNYNYLYRLFRKSNLKPFERDISTEIYQAGSTPCNGVEGFNCYFPLQSYGFQPTNGVGYQPYRVVVLSFELLHAPATVCGPKKSTNLVKNKCVNFNFNGLTGTGVLTESNKKFLPFQQFGRDIADTTDAVRDPQTLEILDITPCSFGGVSVITPGTNTSNQVAVLYQGVNCTEVPVAIHADQLTPTWRVYSTGSNVFQTRAGCLIGAEHVNNSYECDIPIGAGICASYQTQTNSPGSASSVASQSIIAYTMSLGAENSVAYSNNSIAIPTNFTISVTTEILPVSMTKTSVDCTMYICGDSTECSNLLLQYGSFCTQLNRALTGIAVEQDKNTQEVFAQVKQIYKTPPIKDFGGFNFSQILPDPSKPSKRSFIEDLLFNKVTLADAGFIKQYGDCLGDIAARDLICAQKFNGLTVLPPLLTDEMIAQYTSALLAGTITSGWTFGAGAALQIPFAMQMAYRFNGIGVTQNVLYENQKLIANQFNSAIGKIQDSLSSTASALGKLQDVVNQNAQALNTLVKQLSSNFGAISSVLNDILSRLDPPEAEVQIDRLITGRLQSLQTYVTQQLIRAAEIRASANLAATKMSECVLGQSKRVDFCGKGYHLMSFPQSAPHGVVFLHVTYVPAQEKNFTTAPAICHDGKAHFPREGVFVSNGTHWFVTQRNFYEPQIITTDNTFVSGNCDVVIGIVNNTVYDPLQPELDS

SEQ ID NO: 67 - protein, 1121 aa, Artificial Sequence
  Synthetic: (CoV2_RBD_K417M_K391M) mutant Spike (S) protein amino acid sequence
AYTNSFTRGVYYPDKVFRSSVLHSTQDLFLPFFSNVTWFHAIHVSGTNGTKRFDNPVLPFNDGVYFASTEKSNIIRGWIFGTTLDSKTQSLLIVNNATNVVIKVCEFQFCNDPFLGVYYHKNNKSWMESEFRVYSSANNCTFEYVSQPFLMDLEGKQGNFKNLREFVFKNIDGYFKIYSKHTPINLVRDLPQGFSALEPLVDLPIGINITRFQTLLALHRSYLTPGDSSSGWTAGAAAYYVGYLQPRTFLLKYNENGTITDAVDCALDPLSETKCTLKSFTVEKGIYQTSNFRVQPTESIVRFPNITNLCPFGEVFNATRFASVYAWNRKRISNCVADYSVLYNSASFSTFKCYGVSPTKLNDLCFTNVYADSFVIRGDEVRQIAPGQTGMIADYNYKLPDDFTGCVIAWNSNNLDSKVGGNYNYLYRLFRKSNLKPFERDISTEIYQAGSTPCNGVEGFNCYFPLQSYGFQPTNGVGYQPYRVVVLSFELLHAPATVCGPKKSTNLVKNKCVNFNFNGLTGTGVLTESNKKFLPFQQFGRDIADTTDAVRDPQTLEILDITPCSFGGVSVITPGTNTSNQVAVLYQGVNCTEVPVAIHADQLTPTWRVYSTGSNVFQTRAGCLIGAEHVNNSYECDIPIGAGICASYQTQTNSPGSASSVASQSIIAYTMSLGAENSVAYSNNSIAIPTNFTISVTTEILPVSMTKTSVDCTMYICGDSTECSNLLLQYGSFCTQLNRALTGIAVEQDKNTQEVFAQVKQIYKTPPIKDFGGFNFSQILPDPSKPSKRSFIEDLLFNKVTLADAGFIKQYGDCLGDIAARDLICAQKFNGLTVLPPLLTDEMIAQYTSALLAGTITSGWTFGAGAALQIPFAMQMAYRFNGIGVTQNVLYENQKLIANQFNSAIGKIQDSLSSTASALGKLQDVVNQNAQALNTLVKQLSSNFGAISSVLNDILSRLDPPEAEVQIDRLITGRLQSLQTYVTQQLIRAAEIRASANLAATKMSECVLGQSKRVDFCGKGYHLMSFPQSAPHGVVFLHVTYVPAQEKNFTTAPAICHDGKAHFPREGVFVSNGTHWFVTQRNFYEPQIITTDNTFVSGNCDVVIGIVNNTVYDPLQPELDS

SEQ ID NO: 68 - protein, 1121 aa, Artificial Sequence
  Synthetic: (CoV2_RBD_K417W_K391W) mutant Spike (S) protein amino acid sequence
AYTNSFTRGVYYPDKVFRSSVLHSTQDLFLPFFSNVTWFHAIHVSGTNGTKRFDNPVLPFNDGVYFASTEKSNIIRGWIFGTTLDSKTQSLLIVNNATNVVIKVCEFQFCNDPFLGVYYHKNNKSWMESEFRVYSSANNCTFEYVSQPFLMDLEGKQGNFKNLREFVFKNIDGYFKIYSKHTPINLVRDLPQGFSALEPLVDLPIGINITRFQTLLALHRSYLTPGDSSSGWTAGAAAYYVGYLQPRTFLLKYNENGTITDAVDCALDPLSETKCTLKSFTVEKGIYQTSNFRVQPTESIVRFPNITNLCPFGEVFNATRFASVYAWNRKRISNCVADYSVLYNSASFSTFKCYGVSPTKLNDLCFTNVYADSFVIRGDEVRQIAPGQTGWIADYNYKLPDDFTGCVIAWNSNNLDSKVGGNYNYLYRLFRKSNLKPFERDISTEIYQAGSTPCNGVEGFNCYFPLQSYGFQPTNGVGYQPYRVVVLSFELLHAPATVCGPKKSTNLVKNKCVNFNFNGLTGTGVLTESNKKFLPFQQFGRDIADTTDAVRDPQTLEILDITPCSFGGVSVITPGTNTSNQVAVLYQGVNCTEVPVAIHADQLTPTWRVYSTGSNVFQTRAGCLIGAEHVNNSYECDIPIGAGICASYQTQTNSPGSASSVASQSIIAYTMSLGAENSVAYSNNSIAIPTNFTISVTTEILPVSMTKTSVDCTMYICGDSTECSNLLLQYGSFCTQLNRALTGIAVEQDKNTQEVFAQVKQIYKTPPIKDFGGFNFSQILPDPSKPSKRSFIEDLLFNKVTLADAGFIKQYGDCLGDIAARDLICAQKFNGLTVLPPLLTDEMIAQYTSALLAGTITSGWTFGAGAALQIPFAMQMAYRFNGIGVTQNVLYENQKLIANQFNSAIGKIQDSLSSTASALGKLQDVVNQNAQALNTLVKQLSSNFGAISSVLNDILSRLDPPEAEVQIDRLITGRLQSLQTYVTQQLIRAAEIRASANLAATKMSECVLGQSKRVDFCGKGYHLMSFPQSAPHGVVFLHVTYVPAQEKNFTTAPAICHDGKAHFPREGVFVSNGTHWFVTQRNFYEPQIITTDNTFVSGNCDVVIGIVNNTVYDPLQPELDS

SEQ ID NO: 69 - protein, 1121 aa, Artificial Sequence
  Synthetic: (CoV2_RBD_K417Y_K391Y) mutant Spike (S) protein amino acid sequence
AYTNSFTRGVYYPDKVFRSSVLHSTQDLFLPFFSNVTWFHAIHVSGTNGTKRFDNPVLPFNDGVYFASTEKSNIIRGWIFGTTLDSKTQSLLIVNNATNVVIKVCEFQFCNDPFLGVYYHKNNKSWMESEFRVYSSANNCTFEYVSQPFLMDLEGKQGNFKNLREFVFKNIDGYFKIYSKHTPINLVRDLPQGFSALEPLVDLPIGINITRFQTLLALHRSYLTPGDSSSGWTAGAAAYYVGYLQPRTFLLKYNENGTITDAVDCALDPLSETKCTLKSFTVEKGIYQTSNFRVQPTESIVRFPNITNLCPFGEVFNATRFASVYAWNRKRISNCVADYSVLYNSASFSTFKCYGVSPTKLNDLCFTNVYADSFVIRGDEVRQIAPGQTGYIADYNYKLPDDFTGCVIAWNSNNLDSKVGGNYNYLYRLFRKSNLKPFERDISTEIYQAGSTPCNGVEGFNCYFPLQSYGFQPTNGVGYQPYRVVVLSFELLHAPATVCGPKKSTNLVKNKCVNFNFNGLTGTGVLTESNKKFLPFQQFGRDIADTTDAVRDPQTLEILDITPCSFGGVSVITPGTNTSNQVAVLYQGVNCTEVPVAIHADQLTPTWRVYSTGSNVFQTRAGCLIGAEHVNNSYECDIPIGAGICASYQTQTNSPGSASSVASQSIIAYTMSLGAENSVAYSNNSIAIPTNFTISVTTEILPVSMTKTSVDCTMYICGDSTECSNLLLQYGSFCTQLNRALTGIAVEQDKNTQEVFAQVKQIYKTPPIKDFGGFNFSQILPDPSKPSKRSFIEDLLFNKVTLADAGFIKQYGDCLGDIAARDLICAQKFNGLTVLPPLLTDEMIAQYTSALLAGTITSGWTFGAGAALQIPFAMQMAYRFNGIGVTQNVLYENQKLIANQFNSAIGKIQDSLSSTASALGKLQDVVNQNAQALNTLVKQLSSNFGAISSVLNDILSRLDPPEAEVQIDRLITGRLQSLQTYVTQQLIRAAEIRASANLAATKMSECVLGQSKRVDFCGKGYHLMSFPQSAPHGVVFLHVTYVPAQEKNFTTAPAICHDGKAHFPREGVFVSNGTHWFVTQRNFYEPQIITTDNTFVSGNCDVVIGIVNNTVYDPLQPELDS

SEQ ID NO: 70 - protein, 1121 aa, Artificial Sequence
  Synthetic: (CoV2_RBD_Y449A_Y423A) mutant Spike (S) protein amino acid sequence
AYTNSFTRGVYYPDKVFRSSVLHSTQDLFLPFFSNVTWFHAIHVSGTNGTKRFDNPVLPFNDGVYFASTEKSNIIRGWIFGTTLDSKTQSLLIVNNATNVVIKVCEFQFCNDPFLGVYYHKNNKSWMESEFRVYSSANNCTFEYVSQPFLMDLEGKQGNFKNLREFVFKNIDGYFKIYSKHTPINLVRDLPQGFSALEPLVDLPIGINITRFQTLLALHRSYLTPGDSSSGWTAGAAAYYVGYLQPRTFLLKYNENGTITDAVDCALDPLSETKCTLKSFTVEKGIYQTSNFRVQPTESIVRFPNITNLCPFGEVFNATRFASVYAWNRKRISNCVADYSVLYNSASFSTFKCYGVSPTKLNDLCFTNVYADSFVIRGDEVRQIAPGQTGKIADYNYKLPDDFTGCVIAWNSNNLDSKVGGNANYLYRLFRKSNLKPFERDISTEIYQAGSTPCNGVEGFNCYFPLQSYGFQPTNGVGYQPYRVVVLSFELLHAPATVCGPKKSTNLVKNKCVNFNFNGLTGTGVLTESNKKFLPFQQFGRDIADTTDAVRDPQTLEILDITPCSFGGVSVITPGTNTSNQVAVLYQGVNCTEVPVAIHADQLTPTWRVYSTGSNVFQTRAGCLIGAEHVNNSYECDIPIGAGICASYQTQTNSPGSASSVASQSIIAYTMSLGAENSVAYSNNSIAIPTNFTISVTTEILPVSMTKTSVDCTMYICGDSTECSNLLLQYGSFCTQLNRALTGIAVEQDKNTQEVFAQVKQIYKTPPIKDFGGFNFSQILPDPSKPSKRSFIEDLLFNKVTLADAGFIKQYGDCLGDIAARDLICAQKFNGLTVLPPLLTDEMIAQYTSALLAGTITSGWTFGAGAALQIPFAMQMAYRFNGIGVTQNVLYENQKLIANQFNSAIGKIQDSLSSTASALGKLQDVVNQNAQALNTLVKQLSSNFGAISSVLNDILSRLDPPEAEVQIDRLITGRLQSLQTYVTQQLIRAAEIRASANLAATKMSECVLGQSKRVDFCGKGYHLMSFPQSAPHGVVFLHVTYVPAQEKNFTTAPAICHDGKAHFPREGVFVSNGTHWFVTQRNFYEPQIITTDNTFVSGNCDVVIGIVNNTVYDPLQPELDS

SEQ ID NO: 71 - protein, 1121 aa, Artificial Sequence
  Synthetic: (CoV2_RBD_Y453A_Y427A) mutant Spike (S) protein amino acid sequence
AYTNSFTRGVYYPDKVFRSSVLHSTQDLFLPFFSNVTWFHAIHVSGTNGTKRFDNPVLPFNDGVYFASTEKSNIIRGWIFGTTLDSKTQSLLIVNNATNVVIKVCEFQFCNDPFLGVYYHKNNKSWMESEFRVYSSANNCTFEYVSQPFLMDLEGKQGNFKNLREFVFKNIDGYFKIYSKHTPINLVRDLPQGFSALEPLVDLPIGINITRFQTLLALHRSYLTPGDSSSGWTAGAAAYYVGYLQPRTFLLKYNENGTITDAVDCALDPLSETKCTLKSFTVEKGIYQTSNFRVQPTESIVRFPNITNLCPFGEVFNATRFASVYAWNRKRISNCVADYSVLYNSASFSTFKCYGVSPTKLNDLCFTNVYADSFVIRGDEVRQIAPGQTGKIADYNYKLPDDFTGCVIAWNSNNLDSKVGGNYNYLARLFRKSNLKPFERDISTEIYQAGSTPCNGVEGFNCYFPLQSYGFQPTNGVGYQPYRVVVLSFELLHAPATVCGPKKSTNLVKNKCVNFNFNGLTGTGVLTESNKKFLPFQQFGRDIADTTDAVRDPQTLEILDITPCSFGGVSVITPGTNTSNQVAVLYQGVNCTEVPVAIHADQLTPTWRVYSTGSNVFQTRAGCLIGAEHVNNSYECDIPIGAGICASYQTQTNSPGSASSVASQSIIAYTMSLGAENSVAYSNNSIAIPTNFTISVTTEILPVSMTKTSVDCTMYICGDSTECSNLLLQYGSFCTQLNRALTGIAVEQDKNTQEVFAQVKQIYKTPPIKDFGGFNFSQILPDPSKPSKRSFIEDLLFNKVTLADAGFIKQYGDCLGDIAARDLICAQKFNGLTVLPPLLTDEMIAQYTSALLAGTITSGWTFGAGAALQIPFAMQMAYRFNGIGVTQNVLYENQKLIANQFNSAIGKIQDSLSSTASALGKLQDVVNQNAQALNTLVKQLSSNFGAISSVLNDILSRLDPPEAEVQIDRLITGRLQSLQTYVTQQLIRAAEIRASANLAATKMSECVLGQSKRVDFCGKGYHLMSFPQSAPHGVVFLHVTYVPAQEKNFTTAPAICHDGKAHFPREGVFVSNGTHWFVTQRNFYEPQIITTDNTFVSGNCDVVIGIVNNTVYDPLQPELDS

SEQ ID NO: 72 - protein, 1121 aa, Artificial Sequence
  Synthetic: (CoV2_RBD_L455A_L429A) mutant Spike (S) protein amino acid sequence
AYTNSFTRGVYYPDKVFRSSVLHSTQDLFLPFFSNVTWFHAIHVSGTNGTKRFDNPVLPFNDGVYFASTEKSNIIRGWIFGTTLDSKTQSLLIVNNATNVVIKVCEFQFCNDPFLGVYYHKNNKSWMESEFRVYSSANNCTFEYVSQPFLMDLEGKQGNFKNLREFVFKNIDGYFKIYSKHTPINLVRDLPQGFSALEPLVDLPIGINITRFQTLLALHRSYLTPGDSSSGWTAGAAAYYVGYLQPRTFLLKYNENGTITDAVDCALDPLSETKCTLKSFTVEKGIYQTSNFRVQPTESIVRFPNITNLCPFGEVFNATRFASVYAWNRKRISNCVADYSVLYNSASFSTFKCYGVSPTKLNDLCFTNVYADSFVIRGDEVRQIAPGQTGKIADYNYKLPDDFTGCVIAWNSNNLDSKVGGNYNYLYRAFRKSNLKPFERDISTEIYQAGSTPCNGVEGFNCYFPLQSYGFQPTNGVGYQPYRVVVLSFELLHAPATVCGPKKSTNLVKNKCVNFNFNGLTGTGVLTESNKKFLPFQQFGRDIADTTDAVRDPQTLEILDITPCSFGGVSVITPGTNTSNQVAVLYQGVNCTEVPVAIHADQLTPTWRVYSTGSNVFQTRAGCLIGAEHVNNSYECDIPIGAGICASYQTQTNSPGSASSVASQSIIAYTMSLGAENSVAYSNNSIAIPTNFTISVTTEILPVSMTKTSVDCTMYICGDSTECSNLLLQYGSFCTQLNRALTGIAVEQDKNTQEVFAQVKQIYKTPPIKDFGGFNFSQILPDPSKPSKRSFIEDLLFNKVTLADAGFIKQYGDCLGDIAARDLICAQKFNGLTVLPPLLTDEMIAQYTSALLAGTITSGWTFGAGAALQIPFAMQMAYRFNGIGVTQNVLYENQKLIANQFNSAIGKIQDSLSSTASALGKLQDVVNQNAQALNTLVKQLSSNFGAISSVLNDILSRLDPPEAEVQIDRLITGRLQSLQTYVTQQLIRAAEIRASANLAATKMSECVLGQSKRVDFCGKGYHLMSFPQSAPHGVVFLHVTYVPAQEKNFTTAPAICHDGKAHFPREGVFVSNGTHWFVTQRNFYEPQIITTDNTFVSGNCDVVIGIVNNTVYDPLQPELDS

SEQ ID NO: 73 - protein, 1121 aa, Artificial Sequence
  Synthetic: (CoV2_RBD_L455H_L429H) mutant Spike (S) protein amino acid sequence
AYTNSFTRGVYYPDKVFRSSVLHSTQDLFLPFFSNVTWFHAIHVSGTNGTKRFDNPVLPFNDGVYFASTEKSNIIRGWIFGTTLDSKTQSLLIVNNATNVVIKVCEFQFCNDPFLGVYYHKNNKSWMESEFRVYSSANNCTFEYVSQPFLMDLEGKQGNFKNLREFVFKNIDGYFKIYSKHTPINLVRDLPQGFSALEPLVDLPIGINITRFQTLLALHRSYLTPGDSSSGWTAGAAAYYVGYLQPRTFLLKYNENGTITDAVDCALDPLSETKCTLKSFTVEKGIYQTSNFRVQPTESIVRFPNITNLCPFGEVFNATRFASVYAWNRKRISNCVADYSVLYNSASFSTFKCYGVSPTKLNDLCFTNVYADSFVIRGDEVRQIAPGQTGKIADYNYKLPDDFTGCVIAWNSNNLDSKVGGNYNYLYRHFRKSNLKPFERDISTEIYQAGSTPCNGVEGFNCYFPLQSYGFQPTNGVGYQPYRVVVLSFELLHAPATVCGPKKSTNLVKNKCVNFNFNGLTGTGVLTESNKKFLPFQQFGRDIADTTDAVRDPQTLEILDITPCSFGGVSVITPGTNTSNQVAVLYQGVNCTEVPVAIHADQLTPTWRVYSTGSNVFQTRAGCLIGAEHVNNSYECDIPIGAGICASYQTQTNSPGSASSVASQSIIAYTMSLGAENSVAYSNNSIAIPTNFTISVTTEILPVSMTKTSVDCTMYICGDSTECSNLLLQYGSFCTQLNRALTGIAVEQDKNTQEVFAQVKQIYKTPPIKDFGGFNFSQILPDPSKPSKRSFIEDLLFNKVTLADAGFIKQYGDCLGDIAARDLICAQKFNGLTVLPPLLTDEMIAQYTSALLAGTITSGWTFGAGAALQIPFAMQMAYRFNGIGVTQNVLYENQKLIANQFNSAIGKIQDSLSSTASALGKLQDVVNQNAQALNTLVKQLSSNFGAISSVLNDILSRLDPPEAEVQIDRLITGRLQSLQTYVTQQLIRAAEIRASANLAATKMSECVLGQSKRVDFCGKGYHLMSFPQSAPHGVVFLHVTYVPAQEKNFTTAPAICHDGKAHFPREGVFVSNGTHWFVTQRNFYEPQIITTDNTFVSGNCDVVIGIVNNTVYDPLQPELDS

SEQ ID NO: 74 - protein, 1121 aa, Artificial Sequence
  Synthetic: (CoV2_RBD_L455M_L429M) mutant Spike (S) protein amino acid sequence
AYTNSFTRGVYYPDKVFRSSVLHSTQDLFLPFFSNVTWFHAIHVSGTNGTKRFDNPVLPFNDGVYFASTEKSNIIRGWIFGTTLDSKTQSLLIVNNATNVVIKVCEFQFCNDPFLGVYYHKNNKSWMESEFRVYSSANNCTFEYVSQPFLMDLEGKQGNFKNLREFVFKNIDGYFKIYSKHTPINLVRDLPQGFSALEPLVDLPIGINITRFQTLLALHRSYLTPGDSSSGWTAGAAAYYVGYLQPRTFLLKYNENGTITDAVDCALDPLSETKCTLKSFTVEKGIYQTSNFRVQPTESIVRFPNITNLCPFGEVFNATRFASVYAWNRKRISNCVADYSVLYNSASFSTFKCYGVSPTKLNDLCFTNVYADSFVIRGDEVRQIAPGQTGKIADYNYKLPDDFTGCVIAWNSNNLDSKVGGNYNYLYRMFRKSNLKPFERDISTEIYQAGSTPCNGVEGFNCYFPLQSYGFQPTNGVGYQPYRVVVLSFELLHAPATVCGPKKSTNLVKNKCVNFNFNGLTGTGVLTESNKKFLPFQQFGRDIADTTDAVRDPQTLEILDITPCSFGGVSVITPGTNTSNQVAVLYQGVNCTEVPVAIHADQLTPTWRVYSTGSNVFQTRAGCLIGAEHVNNSYECDIPIGAGICASYQTQTNSPGSASSVASQSIIAYTMSLGAENSVAYSNNSIAIPTNFTISVTTEILPVSMTKTSVDCTMYICGDSTECSNLLLQYGSFCTQLNRALTGIAVEQDKNTQEVFAQVKQIYKTPPIKDFGGFNFSQILPDPSKPSKRSFIEDLLFNKVTLADAGFIKQYGDCLGDIAARDLICAQKFNGLTVLPPLLTDEMIAQYTSALLAGTITSGWTFGAGAALQIPFAMQMAYRFNGIGVTQNVLYENQKLIANQFNSAIGKIQDSLSSTASALGKLQDVVNQNAQALNTLVKQLSSNFGAISSVLNDILSRLDPPEAEVQIDRLITGRLQSLQTYVTQQLIRAAEIRASANLAATKMSECVLGQSKRVDFCGKGYHLMSFPQSAPHGVVFLHVTYVPAQEKNFTTAPAICHDGKAHFPREGVFVSNGTHWFVTQRNFYEPQIITTDNTFVSGNCDVVIGIVNNTVYDPLQPELDS

SEQ ID NO: 75 - protein, 1121 aa, Artificial Sequence
  Synthetic: (CoV2_RBD_L455N_L429N) mutant Spike (S) protein amino acid sequence
AYTNSFTRGVYYPDKVFRSSVLHSTQDLFLPFFSNVTWFHAIHVSGTNGTKRFDNPVLPFNDGVYFASTEKSNIIRGWIFGTTLDSKTQSLLIVNNATNVVIKVCEFQFCNDPFLGVYYHKNNKSWMESEFRVYSSANNCTFEYVSQPFLMDLEGKQGNFKNLREFVFKNIDGYFKIYSKHTPINLVRDLPQGFSALEPLVDLPIGINITRFQTLLALHRSYLTPGDSSSGWTAGAAAYYVGYLQPRTFLLKYNENGTITDAVDCALDPLSETKCTLKSFTVEKGIYQTSNFRVQPTESIVRFPNITNLCPFGEVFNATRFASVYAWNRKRISNCVADYSVLYNSASFSTFKCYGVSPTKLNDLCFTNVYADSFVIRGDEVRQIAPGQTGKIADYNYKLPDDFTGCVIAWNSNNLDSKVGGNYNYLYRNFRKSNLKPFERDISTEIYQAGSTPCNGVEGFNCYFPLQSYGFQPTNGVGYQPYRVVVLSFELLHAPATVCGPKKSTNLVKNKCVNFNFNGLTGTGVLTESNKKFLPFQQFGRDIADTTDAVRDPQTLEILDITPCSFGGVSVITPGTNTSNQVAVLYQGVNCTEVPVAIHADQLTPTWRVYSTGSNVFQTRAGCLIGAEHVNNSYECDIPIGAGICASYQTQTNSPGSASSVASQSIIAYTMSLGAENSVAYSNNSIAIPTNFTISVTTEILPVSMTKTSVDCTMYICGDSTECSNLLLQYGSFCTQLNRALTGIAVEQDKNTQEVFAQVKQIYKTPPIKDFGGFNFSQILPDPSKPSKRSFIEDLLFNKVTLADAGFIKQYGDCLGDIAARDLICAQKFNGLTVLPPLLTDEMIAQYTSALLAGTITSGWTFGAGAALQIPFAMQMAYRFNGIGVTQNVLYENQKLIANQFNSAIGKIQDSLSSTASALGKLQDVVNQNAQALNTLVKQLSSNFGAISSVLNDILSRLDPPEAEVQIDRLITGRLQSLQTYVTQQLIRAAEIRASANLAATKMSECVLGQSKRVDFCGKGYHLMSFPQSAPHGVVFLHVTYVPAQEKNFTTAPAICHDGKAHFPREGVFVSNGTHWFVTQRNFYEPQIITTDNTFVSGNCDVVIGIVNNTVYDPLQPELDS

SEQ ID NO: 76 - protein, 1121 aa, Artificial Sequence
  Synthetic: (CoV2_RBD_L455W_L429W) mutant Spike (S) protein amino acid sequence
AYTNSFTRGVYYPDKVFRSSVLHSTQDLFLPFFSNVTWFHAIHVSGTNGTKRFDNPVLPFNDGVYFASTEKSNIIRGWIFGTTLDSKTQSLLIVNNATNVVIKVCEFQFCNDPFLGVYYHKNNKSWMESEFRVYSSANNCTFEYVSQPFLMDLEGKQGNFKNLREFVFKNIDGYFKIYSKHTPINLVRDLPQGFSALEPLVDLPIGINITRFQTLLALHRSYLTPGDSSSGWTAGAAAYYVGYLQPRTFLLKYNENGTITDAVDCALDPLSETKCTLKSFTVEKGIYQTSNFRVQPTESIVRFPNITNLCPFGEVFNATRFASVYAWNRKRISNCVADYSVLYNSASFSTFKCYGVSPTKLNDLCFTNVYADSFVIRGDEVRQIAPGQTGKIADYNYKLPDDFTGCVIAWNSNNLDSKVGGNYNYLYRWFRKSNLKPFERDISTEIYQAGSTPCNGVEGFNCYFPLQSYGFQPTNGVGYQPYRVVVLSFELLHAPATVCGPKKSTNLVKNKCVNFNFNGLTGTGVLTESNKKFLPFQQFGRDIADTTDAVRDPQTLEILDITPCSFGGVSVITPGTNTSNQVAVLYQGVNCTEVPVAIHADQLTPTWRVYSTGSNVFQTRAGCLIGAEHVNNSYECDIPIGAGICASYQTQTNSPGSASSVASQSIIAYTMSLGAENSVAYSNNSIAIPTNFTISVTTEILPVSMTKTSVDCTMYICGDSTECSNLLLQYGSFCTQLNRALTGIAVEQDKNTQEVFAQVKQIYKTPPIKDFGGFNFSQILPDPSKPSKRSFIEDLLFNKVTLADAGFIKQYGDCLGDIAARDLICAQKFNGLTVLPPLLTDEMIAQYTSALLAGTITSGWTFGAGAALQIPFAMQMAYRFNGIGVTQNVLYENQKLIANQFNSAIGKIQDSLSSTASALGKLQDVVNQNAQALNTLVKQLSSNFGAISSVLNDILSRLDPPEAEVQIDRLITGRLQSLQTYVTQQLIRAAEIRASANLAATKMSECVLGQSKRVDFCGKGYHLMSFPQSAPHGVVFLHVTYVPAQEKNFTTAPAICHDGKAHFPREGVFVSNGTHWFVTQRNFYEPQIITTDNTFVSGNCDVVIGIVNNTVYDPLQPELDS

SEQ ID NO: 77 - protein, 1121 aa, Artificial Sequence
  Synthetic: (CoV2_RBD_F456H_F430H) mutant Spike (S) protein amino acid sequence
AYTNSFTRGVYYPDKVFRSSVLHSTQDLFLPFFSNVTWFHAIHVSGTNGTKRFDNPVLPFNDGVYFASTEKSNIIRGWIFGTTLDSKTQSLLIVNNATNVVIKVCEFQFCNDPFLGVYYHKNNKSWMESEFRVYSSANNCTFEYVSQPFLMDLEGKQGNFKNLREFVFKNIDGYFKIYSKHTPINLVRDLPQGFSALEPLVDLPIGINITRFQTLLALHRSYLTPGDSSSGWTAGAAAYYVGYLQPRTFLLKYNENGTITDAVDCALDPLSETKCTLKSFTVEKGIYQTSNFRVQPTESIVRFPNITNLCPFGEVFNATRFASVYAWNRKRISNCVADYSVLYNSASFSTFKCYGVSPTKLNDLCFTNVYADSFVIRGDEVRQIAPGQTGKIADYNYKLPDDFTGCVIAWNSNNLDSKVGGNYNYLYRLHRKSNLKPFERDISTEIYQAGSTPCNGVEGFNCYFPLQSYGFQPTNGVGYQPYRVVVLSFELLHAPATVCGPKKSTNLVKNKCVNFNFNGLTGTGVLTESNKKFLPFQQFGRDIADTTDAVRDPQTLEILDITPCSFGGVSVITPGTNTSNQVAVLYQGVNCTEVPVAIHADQLTPTWRVYSTGSNVFQTRAGCLIGAEHVNNSYECDIPIGAGICASYQTQTNSPGSASSVASQSIIAYTMSLGAENSVAYSNNSIAIPTNFTISVTTEILPVSMTKTSVDCTMYICGDSTECSNLLLQYGSFCTQLNRALTGIAVEQDKNTQEVFAQVKQIYKTPPIKDFGGFNFSQILPDPSKPSKRSFIEDLLFNKVTLADAGFIKQYGDCLGDIAARDLICAQKFNGLTVLPPLLTDEMIAQYTSALLAGTITSGWTFGAGAALQIPFAMQMAYRFNGIGVTQNVLYENQKLIANQFNSAIGKIQDSLSSTASALGKLQDVVNQNAQALNTLVKQLSSNFGAISSVLNDILSRLDPPEAEVQIDRLITGRLQSLQTYVTQQLIRAAEIRASANLAATKMSECVLGQSKRVDFCGKGYHLMSFPQSAPHGVVFLHVTYVPAQEKNFTTAPAICHDGKAHFPREGVFVSNGTHWFVTQRNFYEPQIITTDNTFVSGNCDVVIGIVNNTVYDPLQPELDS

SEQ ID NO: 78 - protein, 1121 aa, Artificial Sequence
  Synthetic: (CoV2_RBD_F456I_F430I) mutant Spike (S) protein amino acid sequence
AYTNSFTRGVYYPDKVFRSSVLHSTQDLFLPFFSNVTWFHAIHVSGTNGTKRFDNPVLPFNDGVYFASTEKSNIIRGWIFGTTLDSKTQSLLIVNNATNVVIKVCEFQFCNDPFLGVYYHKNNKSWMESEFRVYSSANNCTFEYVSQPFLMDLEGKQGNFKNLREFVFKNIDGYFKIYSKHTPINLVRDLPQGFSALEPLVDLPIGINITRFQTLLALHRSYLTPGDSSSGWTAGAAAYYVGYLQPRTFLLKYNENGTITDAVDCALDPLSETKCTLKSFTVEKGIYQTSNFRVQPTESIVRFPNITNLCPFGEVFNATRFASVYAWNRKRISNCVADYSVLYNSASFSTFKCYGVSPTKLNDLCFTNVYADSFVIRGDEVRQIAPGQTGKIADYNYKLPDDFTGCVIAWNSNNLDSKVGGNYNYLYRLIRKSNLKPFERDISTEIYQAGSTPCNGVEGFNCYFPLQSYGFQPTNGVGYQPYRVVVLSFELLHAPATVCGPKKSTNLVKNKCVNFNFNGLTGTGVLTESNKKFLPFQQFGRDIADTTDAVRDPQTLEILDITPCSFGGVSVITPGTNTSNQVAVLYQGVNCTEVPVAIHADQLTPTWRVYSTGSNVFQTRAGCLIGAEHVNNSYECDIPIGAGICASYQTQTNSPGSASSVASQSIIAYTMSLGAENSVAYSNNSIAIPTNFTISVTTEILPVSMTKTSVDCTMYICGDSTECSNLLLQYGSFCTQLNRALTGIAVEQDKNTQEVFAQVKQIYKTPPIKDFGGFNFSQILPDPSKPSKRSFIEDLLFNKVTLADAGFIKQYGDCLGDIAARDLICAQKFNGLTVLPPLLTDEMIAQYTSALLAGTITSGWTFGAGAALQIPFAMQMAYRFNGIGVTQNVLYENQKLIANQFNSAIGKIQDSLSSTASALGKLQDVVNQNAQALNTLVKQLSSNFGAISSVLNDILSRLDPPEAEVQIDRLITGRLQSLQTYVTQQLIRAAEIRASANLAATKMSECVLGQSKRVDFCGKGYHLMSFPQSAPHGVVFLHVTYVPAQEKNFTTAPAICHDGKAHFPREGVFVSNGTHWFVTQRNFYEPQIITTDNTFVSGNCDVVIGIVNNTVYDPLQPELDS

SEQ ID NO: 79 - protein, 1121 aa, Artificial Sequence
  Synthetic: (CoV2_RBD_F456W_F430W) mutant Spike (S) protein amino acid sequence
AYTNSFTRGVYYPDKVFRSSVLHSTQDLFLPFFSNVTWFHAIHVSGTNGTKRFDNPVLPFNDGVYFASTEKSNIIRGWIFGTTLDSKTQSLLIVNNATNVVIKVCEFQFCNDPFLGVYYHKNNKSWMESEFRVYSSANNCTFEYVSQPFLMDLEGKQGNFKNLREFVFKNIDGYFKIYSKHTPINLVRDLPQGFSALEPLVDLPIGINITRFQTLLALHRSYLTPGDSSSGWTAGAAAYYVGYLQPRTFLLKYNENGTITDAVDCALDPLSETKCTLKSFTVEKGIYQTSNFRVQPTESIVRFPNITNLCPFGEVFNATRFASVYAWNRKRISNCVADYSVLYNSASFSTFKCYGVSPTKLNDLCFTNVYADSFVIRGDEVRQIAPGQTGKIADYNYKLPDDFTGCVIAWNSNNLDSKVGGNYNYLYRLWRKSNLKPFERDISTEIYQAGSTPCNGVEGFNCYFPLQSYGFQPTNGVGYQPYRVVVLSFELLHAPATVCGPKKSTNLVKNKCVNFNFNGLTGTGVLTESNKKFLPFQQFGRDIADTTDAVRDPQTLEILDITPCSFGGVSVITPGTNTSNQVAVLYQGVNCTEVPVAIHADQLTPTWRVYSTGSNVFQTRAGCLIGAEHVNNSYECDIPIGAGICASYQTQTNSPGSASSVASQSIIAYTMSLGAENSVAYSNNSIAIPTNFTISVTTEILPVSMTKTSVDCTMYICGDSTECSNLLLQYGSFCTQLNRALTGIAVEQDKNTQEVFAQVKQIYKTPPIKDFGGFNFSQILPDPSKPSKRSFIEDLLFNKVTLADAGFIKQYGDCLGDIAARDLICAQKFNGLTVLPPLLTDEMIAQYTSALLAGTITSGWTFGAGAALQIPFAMQMAYRFNGIGVTQNVLYENQKLIANQFNSAIGKIQDSLSSTASALGKLQDVVNQNAQALNTLVKQLSSNFGAISSVLNDILSRLDPPEAEVQIDRLITGRLQSLQTYVTQQLIRAAEIRASANLAATKMSECVLGQSKRVDFCGKGYHLMSFPQSAPHGVVFLHVTYVPAQEKNFTTAPAICHDGKAHFPREGVFVSNGTHWFVTQRNFYEPQIITTDNTFVSGNCDVVIGIVNNTVYDPLQPELDS

SEQ ID NO: 80 - protein, 1121 aa, Artificial Sequence
  Synthetic: (CoV2_RBD_F456Y_F430Y) mutant Spike (S) protein amino acid sequence
AYTNSFTRGVYYPDKVFRSSVLHSTQDLFLPFFSNVTWFHAIHVSGTNGTKRFDNPVLPFNDGVYFASTEKSNIIRGWIFGTTLDSKTQSLLIVNNATNVVIKVCEFQFCNDPFLGVYYHKNNKSWMESEFRVYSSANNCTFEYVSQPFLMDLEGKQGNFKNLREFVFKNIDGYFKIYSKHTPINLVRDLPQGFSALEPLVDLPIGINITRFQTLLALHRSYLTPGDSSSGWTAGAAAYYVGYLQPRTFLLKYNENGTITDAVDCALDPLSETKCTLKSFTVEKGIYQTSNFRVQPTESIVRFPNITNLCPFGEVFNATRFASVYAWNRKRISNCVADYSVLYNSASFSTFKCYGVSPTKLNDLCFTNVYADSFVIRGDEVRQIAPGQTGKIADYNYKLPDDFTGCVIAWNSNNLDSKVGGNYNYLYRLYRKSNLKPFERDISTEIYQAGSTPCNGVEGFNCYFPLQSYGFQPTNGVGYQPYRVVVLSFELLHAPATVCGPKKSTNLVKNKCVNFNFNGLTGTGVLTESNKKFLPFQQFGRDIADTTDAVRDPQTLEILDITPCSFGGVSVITPGTNTSNQVAVLYQGVNCTEVPVAIHADQLTPTWRVYSTGSNVFQTRAGCLIGAEHVNNSYECDIPIGAGICASYQTQTNSPGSASSVASQSIIAYTMSLGAENSVAYSNNSIAIPTNFTISVTTEILPVSMTKTSVDCTMYICGDSTECSNLLLQYGSFCTQLNRALTGIAVEQDKNTQEVFAQVKQIYKTPPIKDFGGFNFSQILPDPSKPSKRSFIEDLLFNKVTLADAGFIKQYGDCLGDIAARDLICAQKFNGLTVLPPLLTDEMIAQYTSALLAGTITSGWTFGAGAALQIPFAMQMAYRFNGIGVTQNVLYENQKLIANQFNSAIGKIQDSLSSTASALGKLQDVVNQNAQALNTLVKQLSSNFGAISSVLNDILSRLDPPEAEVQIDRLITGRLQSLQTYVTQQLIRAAEIRASANLAATKMSECVLGQSKRVDFCGKGYHLMSFPQSAPHGVVFLHVTYVPAQEKNFTTAPAICHDGKAHFPREGVFVSNGTHWFVTQRNFYEPQIITTDNTFVSGNCDVVIGIVNNTVYDPLQPELDS

SEQ ID NO: 81 - protein, 1121 aa, Artificial Sequence
  Synthetic: (CoV2_RBD_Y473W_Y447W) mutant Spike (S) protein amino acid sequence
AYTNSFTRGVYYPDKVFRSSVLHSTQDLFLPFFSNVTWFHAIHVSGTNGTKRFDNPVLPFNDGVYFASTEKSNIIRGWIFGTTLDSKTQSLLIVNNATNVVIKVCEFQFCNDPFLGVYYHKNNKSWMESEFRVYSSANNCTFEYVSQPFLMDLEGKQGNFKNLREFVFKNIDGYFKIYSKHTPINLVRDLPQGFSALEPLVDLPIGINITRFQTLLALHRSYLTPGDSSSGWTAGAAAYYVGYLQPRTFLLKYNENGTITDAVDCALDPLSETKCTLKSFTVEKGIYQTSNFRVQPTESIVRFPNITNLCPFGEVFNATRFASVYAWNRKRISNCVADYSVLYNSASFSTFKCYGVSPTKLNDLCFTNVYADSFVIRGDEVRQIAPGQTGKIADYNYKLPDDFTGCVIAWNSNNLDSKVGGNYNYLYRLFRKSNLKPFERDISTEIWQAGSTPCNGVEGFNCYFPLQSYGFQPTNGVGYQPYRVVVLSFELLHAPATVCGPKKSTNLVKNKCVNFNFNGLTGTGVLTESNKKFLPFQQFGRDIADTTDAVRDPQTLEILDITPCSFGGVSVITPGTNTSNQVAVLYQGVNCTEVPVAIHADQLTPTWRVYSTGSNVFQTRAGCLIGAEHVNNSYECDIPIGAGICASYQTQTNSPGSASSVASQSIIAYTMSLGAENSVAYSNNSIAIPTNFTISVTTEILPVSMTKTSVDCTMYICGDSTECSNLLLQYGSFCTQLNRALTGIAVEQDKNTQEVFAQVKQIYKTPPIKDFGGFNFSQILPDPSKPSKRSFIEDLLFNKVTLADAGFIKQYGDCLGDIAARDLICAQKFNGLTVLPPLLTDEMIAQYTSALLAGTITSGWTFGAGAALQIPFAMQMAYRFNGIGVTQNVLYENQKLIANQFNSAIGKIQDSLSSTASALGKLQDVVNQNAQALNTLVKQLSSNFGAISSVLNDILSRLDPPEAEVQIDRLITGRLQSLQTYVTQQLIRAAEIRASANLAATKMSECVLGQSKRVDFCGKGYHLMSFPQSAPHGVVFLHVTYVPAQEKNFTTAPAICHDGKAHFPREGVFVSNGTHWFVTQRNFYEPQIITTDNTFVSGNCDVVIGIVNNTVYDPLQPELDS

SEQ ID NO: 82 - protein, 1121 aa, Artificial Sequence
  Synthetic: (CoV2_RBD_A475M_A449M) mutant Spike (S) protein amino acid sequence
AYTNSFTRGVYYPDKVFRSSVLHSTQDLFLPFFSNVTWFHAIHVSGTNGTKRFDNPVLPFNDGVYFASTEKSNIIRGWIFGTTLDSKTQSLLIVNNATNVVIKVCEFQFCNDPFLGVYYHKNNKSWMESEFRVYSSANNCTFEYVSQPFLMDLEGKQGNFKNLREFVFKNIDGYFKIYSKHTPINLVRDLPQGFSALEPLVDLPIGINITRFQTLLALHRSYLTPGDSSSGWTAGAAAYYVGYLQPRTFLLKYNENGTITDAVDCALDPLSETKCTLKSFTVEKGIYQTSNFRVQPTESIVRFPNITNLCPFGEVFNATRFASVYAWNRKRISNCVADYSVLYNSASFSTFKCYGVSPTKLNDLCFTNVYADSFVIRGDEVRQIAPGQTGKIADYNYKLPDDFTGCVIAWNSNNLDSKVGGNYNYLYRLFRKSNLKPFERDISTEIYQMGSTPCNGVEGFNCYFPLQSYGFQPTNGVGYQPYRVVVLSFELLHAPATVCGPKKSTNLVKNKCVNFNFNGLTGTGVLTESNKKFLPFQQFGRDIADTTDAVRDPQTLEILDITPCSFGGVSVITPGTNTSNQVAVLYQGVNCTEVPVAIHADQLTPTWRVYSTGSNVFQTRAGCLIGAEHVNNSYECDIPIGAGICASYQTQTNSPGSASSVASQSIIAYTMSLGAENSVAYSNNSIAIPTNFTISVTTEILPVSMTKTSVDCTMYICGDSTECSNLLLQYGSFCTQLNRALTGIAVEQDKNTQEVFAQVKQIYKTPPIKDFGGFNFSQILPDPSKPSKRSFIEDLLFNKVTLADAGFIKQYGDCLGDIAARDLICAQKFNGLTVLPPLLTDEMIAQYTSALLAGTITSGWTFGAGAALQIPFAMQMAYRFNGIGVTQNVLYENQKLIANQFNSAIGKIQDSLSSTASALGKLQDVVNQNAQALNTLVKQLSSNFGAISSVLNDILSRLDPPEAEVQIDRLITGRLQSLQTYVTQQLIRAAEIRASANLAATKMSECVLGQSKRVDFCGKGYHLMSFPQSAPHGVVFLHVTYVPAQEKNFTTAPAICHDGKAHFPREGVFVSNGTHWFVTQRNFYEPQIITTDNTFVSGNCDVVIGIVNNTVYDPLQPELDS

SEQ ID NO: 83 - protein, 1121 aa, Artificial Sequence
  Synthetic: (CoV2_RBD_G476T_G450T) mutant Spike (S) protein amino acid sequence
AYTNSFTRGVYYPDKVFRSSVLHSTQDLFLPFFSNVTWFHAIHVSGTNGTKRFDNPVLPFNDGVYFASTEKSNIIRGWIFGTTLDSKTQSLLIVNNATNVVIKVCEFQFCNDPFLGVYYHKNNKSWMESEFRVYSSANNCTFEYVSQPFLMDLEGKQGNFKNLREFVFKNIDGYFKIYSKHTPINLVRDLPQGFSALEPLVDLPIGINITRFQTLLALHRSYLTPGDSSSGWTAGAAAYYVGYLQPRTFLLKYNENGTITDAVDCALDPLSETKCTLKSFTVEKGIYQTSNFRVQPTESIVRFPNITNLCPFGEVFNATRFASVYAWNRKRISNCVADYSVLYNSASFSTFKCYGVSPTKLNDLCFTNVYADSFVIRGDEVRQIAPGQTGKIADYNYKLPDDFTGCVIAWNSNNLDSKVGGNYNYLYRLFRKSNLKPFERDISTEIYQATSTPCNGVEGFNCYFPLQSYGFQPTNGVGYQPYRVVVLSFELLHAPATVCGPKKSTNLVKNKCVNFNFNGLTGTGVLTESNKKFLPFQQFGRDIADTTDAVRDPQTLEILDITPCSFGGVSVITPGTNTSNQVAVLYQGVNCTEVPVAIHADQLTPTWRVYSTGSNVFQTRAGCLIGAEHVNNSYECDIPIGAGICASYQTQTNSPGSASSVASQSIIAYTMSLGAENSVAYSNNSIAIPTNFTISVTTEILPVSMTKTSVDCTMYICGDSTECSNLLLQYGSFCTQLNRALTGIAVEQDKNTQEVFAQVKQIYKTPPIKDFGGFNFSQILPDPSKPSKRSFIEDLLFNKVTLADAGFIKQYGDCLGDIAARDLICAQKFNGLTVLPPLLTDEMIAQYTSALLAGTITSGWTFGAGAALQIPFAMQMAYRFNGIGVTQNVLYENQKLIANQFNSAIGKIQDSLSSTASALGKLQDVVNQNAQALNTLVKQLSSNFGAISSVLNDILSRLDPPEAEVQIDRLITGRLQSLQTYVTQQLIRAAEIRASANLAATKMSECVLGQSKRVDFCGKGYHLMSFPQSAPHGVVFLHVTYVPAQEKNFTTAPAICHDGKAHFPREGVFVSNGTHWFVTQRNFYEPQIITTDNTFVSGNCDVVIGIVNNTVYDPLQPELDS

SEQ ID NO: 84 - protein, 1121 aa, Artificial Sequence
  Synthetic: (CoV2_RBD_F486H_F460H) mutant Spike (S) protein amino acid sequence
AYTNSFTRGVYYPDKVFRSSVLHSTQDLFLPFFSNVTWFHAIHVSGTNGTKRFDNPVLPFNDGVYFASTEKSNIIRGWIFGTTLDSKTQSLLIVNNATNVVIKVCEFQFCNDPFLGVYYHKNNKSWMESEFRVYSSANNCTFEYVSQPFLMDLEGKQGNFKNLREFVFKNIDGYFKIYSKHTPINLVRDLPQGFSALEPLVDLPIGINITRFQTLLALHRSYLTPGDSSSGWTAGAAAYYVGYLQPRTFLLKYNENGTITDAVDCALDPLSETKCTLKSFTVEKGIYQTSNFRVQPTESIVRFPNITNLCPFGEVFNATRFASVYAWNRKRISNCVADYSVLYNSASFSTFKCYGVSPTKLNDLCFTNVYADSFVIRGDEVRQIAPGQTGKIADYNYKLPDDFTGCVIAWNSNNLDSKVGGNYNYLYRLFRKSNLKPFERDISTEIYQAGSTPCNGVEGHNCYFPLQSYGFQPTNGVGYQPYRVVVLSFELLHAPATVCGPKKSTNLVKNKCVNFNFNGLTGTGVLTESNKKFLPFQQFGRDIADTTDAVRDPQTLEILDITPCSFGGVSVITPGTNTSNQVAVLYQGVNCTEVPVAIHADQLTPTWRVYSTGSNVFQTRAGCLIGAEHVNNSYECDIPIGAGICASYQTQTNSPGSASSVASQSIIAYTMSLGAENSVAYSNNSIAIPTNFTISVTTEILPVSMTKTSVDCTMYICGDSTECSNLLLQYGSFCTQLNRALTGIAVEQDKNTQEVFAQVKQIYKTPPIKDFGGFNFSQILPDPSKPSKRSFIEDLLFNKVTLADAGFIKQYGDCLGDIAARDLICAQKFNGLTVLPPLLTDEMIAQYTSALLAGTITSGWTFGAGAALQIPFAMQMAYRFNGIGVTQNVLYENQKLIANQFNSAIGKIQDSLSSTASALGKLQDVVNQNAQALNTLVKQLSSNFGAISSVLNDILSRLDPPEAEVQIDRLITGRLQSLQTYVTQQLIRAAEIRASANLAATKMSECVLGQSKRVDFCGKGYHLMSFPQSAPHGVVFLHVTYVPAQEKNFTTAPAICHDGKAHFPREGVFVSNGTHWFVTQRNFYEPQIITTDNTFVSGNCDVVIGIVNNTVYDPLQPELDS

SEQ ID NO: 85 - protein, 1121 aa, Artificial Sequence
  Synthetic: (CoV2_RBD_F486I_F460I) mutant Spike (S) protein amino acid sequence
AYTNSFTRGVYYPDKVFRSSVLHSTQDLFLPFFSNVTWFHAIHVSGTNGTKRFDNPVLPFNDGVYFASTEKSNIIRGWIFGTTLDSKTQSLLIVNNATNVVIKVCEFQFCNDPFLGVYYHKNNKSWMESEFRVYSSANNCTFEYVSQPFLMDLEGKQGNFKNLREFVFKNIDGYFKIYSKHTPINLVRDLPQGFSALEPLVDLPIGINITRFQTLLALHRSYLTPGDSSSGWTAGAAAYYVGYLQPRTFLLKYNENGTITDAVDCALDPLSETKCTLKSFTVEKGIYQTSNFRVQPTESIVRFPNITNLCPFGEVFNATRFASVYAWNRKRISNCVADYSVLYNSASFSTFKCYGVSPTKLNDLCFTNVYADSFVIRGDEVRQIAPGQTGKIADYNYKLPDDFTGCVIAWNSNNLDSKVGGNYNYLYRLFRKSNLKPFERDISTEIYQAGSTPCNGVEGINCYFPLQSYGFQPTNGVGYQPYRVVVLSFELLHAPATVCGPKKSTNLVKNKCVNFNFNGLTGTGVLTESNKKFLPFQQFGRDIADTTDAVRDPQTLEILDITPCSFGGVSVITPGTNTSNQVAVLYQGVNCTEVPVAIHADQLTPTWRVYSTGSNVFQTRAGCLIGAEHVNNSYECDIPIGAGICASYQTQTNSPGSASSVASQSIIAYTMSLGAENSVAYSNNSIAIPTNFTISVTTEILPVSMTKTSVDCTMYICGDSTECSNLLLQYGSFCTQLNRALTGIAVEQDKNTQEVFAQVKQIYKTPPIKDFGGFNFSQILPDPSKPSKRSFIEDLLFNKVTLADAGFIKQYGDCLGDIAARDLICAQKFNGLTVLPPLLTDEMIAQYTSALLAGTITSGWTFGAGAALQIPFAMQMAYRFNGIGVTQNVLYENQKLIANQFNSAIGKIQDSLSSTASALGKLQDVVNQNAQALNTLVKQLSSNFGAISSVLNDILSRLDPPEAEVQIDRLITGRLQSLQTYVTQQLIRAAEIRASANLAATKMSECVLGQSKRVDFCGKGYHLMSFPQSAPHGVVFLHVTYVPAQEKNFTTAPAICHDGKAHFPREGVFVSNGTHWFVTQRNFYEPQIITTDNTFVSGNCDVVIGIVNNTVYDPLQPELDS

SEQ ID NO: 86 - protein, 1121 aa, Artificial Sequence
  Synthetic: (CoV2_RBD_F486L_F460L) mutant Spike (S) protein amino acid sequence
AYTNSFTRGVYYPDKVFRSSVLHSTQDLFLPFFSNVTWFHAIHVSGTNGTKRFDNPVLPFNDGVYFASTEKSNIIRGWIFGTTLDSKTQSLLIVNNATNVVIKVCEFQFCNDPFLGVYYHKNNKSWMESEFRVYSSANNCTFEYVSQPFLMDLEGKQGNFKNLREFVFKNIDGYFKIYSKHTPINLVRDLPQGFSALEPLVDLPIGINITRFQTLLALHRSYLTPGDSSSGWTAGAAAYYVGYLQPRTFLLKYNENGTITDAVDCALDPLSETKCTLKSFTVEKGIYQTSNFRVQPTESIVRFPNITNLCPFGEVFNATRFASVYAWNRKRISNCVADYSVLYNSASFSTFKCYGVSPTKLNDLCFTNVYADSFVIRGDEVRQIAPGQTGKIADYNYKLPDDFTGCVIAWNSNNLDSKVGGNYNYLYRLFRKSNLKPFERDISTEIYQAGSTPCNGVEGLNCYFPLQSYGFQPTNGVGYQPYRVVVLSFELLHAPATVCGPKKSTNLVKNKCVNFNFNGLTGTGVLTESNKKFLPFQQFGRDIADTTDAVRDPQTLEILDITPCSFGGVSVITPGTNTSNQVAVLYQGVNCTEVPVAIHADQLTPTWRVYSTGSNVFQTRAGCLIGAEHVNNSYECDIPIGAGICASYQTQTNSPGSASSVASQSIIAYTMSLGAENSVAYSNNSIAIPTNFTISVTTEILPVSMTKTSVDCTMYICGDSTECSNLLLQYGSFCTQLNRALTGIAVEQDKNTQEVFAQVKQIYKTPPIKDFGGFNFSQILPDPSKPSKRSFIEDLLFNKVTLADAGFIKQYGDCLGDIAARDLICAQKFNGLTVLPPLLTDEMIAQYTSALLAGTITSGWTFGAGAALQIPFAMQMAYRFNGIGVTQNVLYENQKLIANQFNSAIGKIQDSLSSTASALGKLQDVVNQNAQALNTLVKQLSSNFGAISSVLNDILSRLDPPEAEVQIDRLITGRLQSLQTYVTQQLIRAAEIRASANLAATKMSECVLGQSKRVDFCGKGYHLMSFPQSAPHGVVFLHVTYVPAQEKNFTTAPAICHDGKAHFPREGVFVSNGTHWFVTQRNFYEPQIITTDNTFVSGNCDVVIGIVNNTVYDPLQPELDS

SEQ ID NO: 87 - protein, 1121 aa, Artificial Sequence
  Synthetic: (CoV2_RBD_F486M_F460M) mutant Spike (S) protein amino acid sequence
AYTNSFTRGVYYPDKVFRSSVLHSTQDLFLPFFSNVTWFHAIHVSGTNGTKRFDNPVLPFNDGVYFASTEKSNIIRGWIFGTTLDSKTQSLLIVNNATNVVIKVCEFQFCNDPFLGVYYHKNNKSWMESEFRVYSSANNCTFEYVSQPFLMDLEGKQGNFKNLREFVFKNIDGYFKIYSKHTPINLVRDLPQGFSALEPLVDLPIGINITRFQTLLALHRSYLTPGDSSSGWTAGAAAYYVGYLQPRTFLLKYNENGTITDAVDCALDPLSETKCTLKSFTVEKGIYQTSNFRVQPTESIVRFPNITNLCPFGEVFNATRFASVYAWNRKRISNCVADYSVLYNSASFSTFKCYGVSPTKLNDLCFTNVYADSFVIRGDEVRQIAPGQTGKIADYNYKLPDDFTGCVIAWNSNNLDSKVGGNYNYLYRLFRKSNLKPFERDISTEIYQAGSTPCNGVEGMNCYFPLQSYGFQPTNGVGYQPYRVVVLSFELLHAPATVCGPKKSTNLVKNKCVNFNFNGLTGTGVLTESNKKFLPFQQFGRDIADTTDAVRDPQTLEILDITPCSFGGVSVITPGTNTSNQVAVLYQGVNCTEVPVAIHADQLTPTWRVYSTGSNVFQTRAGCLIGAEHVNNSYECDIPIGAGICASYQTQTNSPGSASSVASQSIIAYTMSLGAENSVAYSNNSIAIPTNFTISVTTEILPVSMTKTSVDCTMYICGDSTECSNLLLQYGSFCTQLNRALTGIAVEQDKNTQEVFAQVKQIYKTPPIKDFGGFNFSQILPDPSKPSKRSFIEDLLFNKVTLADAGFIKQYGDCLGDIAARDLICAQKFNGLTVLPPLLTDEMIAQYTSALLAGTITSGWTFGAGAALQIPFAMQMAYRFNGIGVTQNVLYENQKLIANQFNSAIGKIQDSLSSTASALGKLQDVVNQNAQALNTLVKQLSSNFGAISSVLNDILSRLDPPEAEVQIDRLITGRLQSLQTYVTQQLIRAAEIRASANLAATKMSECVLGQSKRVDFCGKGYHLMSFPQSAPHGVVFLHVTYVPAQEKNFTTAPAICHDGKAHFPREGVFVSNGTHWFVTQRNFYEPQIITTDNTFVSGNCDVVIGIVNNTVYDPLQPELDS

SEQ ID NO: 88 - protein, 1121 aa, Artificial Sequence
  Synthetic: (CoV2_RBD_F486N_F460N) mutant Spike (S) protein amino acid sequence
AYTNSFTRGVYYPDKVFRSSVLHSTQDLFLPFFSNVTWFHAIHVSGTNGTKRFDNPVLPFNDGVYFASTEKSNIIRGWIFGTTLDSKTQSLLIVNNATNVVIKVCEFQFCNDPFLGVYYHKNNKSWMESEFRVYSSANNCTFEYVSQPFLMDLEGKQGNFKNLREFVFKNIDGYFKIYSKHTPINLVRDLPQGFSALEPLVDLPIGINITRFQTLLALHRSYLTPGDSSSGWTAGAAAYYVGYLQPRTFLLKYNENGTITDAVDCALDPLSETKCTLKSFTVEKGIYQTSNFRVQPTESIVRFPNITNLCPFGEVFNATRFASVYAWNRKRISNCVADYSVLYNSASFSTFKCYGVSPTKLNDLCFTNVYADSFVIRGDEVRQIAPGQTGKIADYNYKLPDDFTGCVIAWNSNNLDSKVGGNYNYLYRLFRKSNLKPFERDISTEIYQAGSTPCNGVEGNNCYFPLQSYGFQPTNGVGYQPYRVVVLSFELLHAPATVCGPKKSTNLVKNKCVNFNFNGLTGTGVLTESNKKFLPFQQFGRDIADTTDAVRDPQTLEILDITPCSFGGVSVITPGTNTSNQVAVLYQGVNCTEVPVAIHADQLTPTWRVYSTGSNVFQTRAGCLIGAEHVNNSYECDIPIGAGICASYQTQTNSPGSASSVASQSIIAYTMSLGAENSVAYSNNSIAIPTNFTISVTTEILPVSMTKTSVDCTMYICGDSTECSNLLLQYGSFCTQLNRALTGIAVEQDKNTQEVFAQVKQIYKTPPIKDFGGFNFSQILPDPSKPSKRSFIEDLLFNKVTLADAGFIKQYGDCLGDIAARDLICAQKFNGLTVLPPLLTDEMIAQYTSALLAGTITSGWTFGAGAALQIPFAMQMAYRFNGIGVTQNVLYENQKLIANQFNSAIGKIQDSLSSTASALGKLQDVVNQNAQALNTLVKQLSSNFGAISSVLNDILSRLDPPEAEVQIDRLITGRLQSLQTYVTQQLIRAAEIRASANLAATKMSECVLGQSKRVDFCGKGYHLMSFPQSAPHGVVFLHVTYVPAQEKNFTTAPAICHDGKAHFPREGVFVSNGTHWFVTQRNFYEPQIITTDNTFVSGNCDVVIGIVNNTVYDPLQPELDS

SEQ ID NO: 89 - protein, 1121 aa, Artificial Sequence
  Synthetic: (CoV2_RBD_F486P_F460P) mutant Spike (S) protein amino acid sequence
AYTNSFTRGVYYPDKVFRSSVLHSTQDLFLPFFSNVTWFHAIHVSGTNGTKRFDNPVLPFNDGVYFASTEKSNIIRGWIFGTTLDSKTQSLLIVNNATNVVIKVCEFQFCNDPFLGVYYHKNNKSWMESEFRVYSSANNCTFEYVSQPFLMDLEGKQGNFKNLREFVFKNIDGYFKIYSKHTPINLVRDLPQGFSALEPLVDLPIGINITRFQTLLALHRSYLTPGDSSSGWTAGAAAYYVGYLQPRTFLLKYNENGTITDAVDCALDPLSETKCTLKSFTVEKGIYQTSNFRVQPTESIVRFPNITNLCPFGEVFNATRFASVYAWNRKRISNCVADYSVLYNSASFSTFKCYGVSPTKLNDLCFTNVYADSFVIRGDEVRQIAPGQTGKIADYNYKLPDDFTGCVIAWNSNNLDSKVGGNYNYLYRLFRKSNLKPFERDISTEIYQAGSTPCNGVEGPNCYFPLQSYGFQPTNGVGYQPYRVVVLSFELLHAPATVCGPKKSTNLVKNKCVNFNFNGLTGTGVLTESNKKFLPFQQFGRDIADTTDAVRDPQTLEILDITPCSFGGVSVITPGTNTSNQVAVLYQGVNCTEVPVAIHADQLTPTWRVYSTGSNVFQTRAGCLIGAEHVNNSYECDIPIGAGICASYQTQTNSPGSASSVASQSIIAYTMSLGAENSVAYSNNSIAIPTNFTISVTTEILPVSMTKTSVDCTMYICGDSTECSNLLLQYGSFCTQLNRALTGIAVEQDKNTQEVFAQVKQIYKTPPIKDFGGFNFSQILPDPSKPSKRSFIEDLLFNKVTLADAGFIKQYGDCLGDIAARDLICAQKFNGLTVLPPLLTDEMIAQYTSALLAGTITSGWTFGAGAALQIPFAMQMAYRFNGIGVTQNVLYENQKLIANQFNSAIGKIQDSLSSTASALGKLQDVVNQNAQALNTLVKQLSSNFGAISSVLNDILSRLDPPEAEVQIDRLITGRLQSLQTYVTQQLIRAAEIRASANLAATKMSECVLGQSKRVDFCGKGYHLMSFPQSAPHGVVFLHVTYVPAQEKNFTTAPAICHDGKAHFPREGVFVSNGTHWFVTQRNFYEPQIITTDNTFVSGNCDVVIGIVNNTVYDPLQPELDS

SEQ ID NO: 90 - protein, 1121 aa, Artificial Sequence
  Synthetic: (CoV2_RBD_F486T_F460T) mutant Spike (S) protein amino acid sequence
AYTNSFTRGVYYPDKVFRSSVLHSTQDLFLPFFSNVTWFHAIHVSGTNGTKRFDNPVLPFNDGVYFASTEKSNIIRGWIFGTTLDSKTQSLLIVNNATNVVIKVCEFQFCNDPFLGVYYHKNNKSWMESEFRVYSSANNCTFEYVSQPFLMDLEGKQGNFKNLREFVFKNIDGYFKIYSKHTPINLVRDLPQGFSALEPLVDLPIGINITRFQTLLALHRSYLTPGDSSSGWTAGAAAYYVGYLQPRTFLLKYNENGTITDAVDCALDPLSETKCTLKSFTVEKGIYQTSNFRVQPTESIVRFPNITNLCPFGEVFNATRFASVYAWNRKRISNCVADYSVLYNSASFSTFKCYGVSPTKLNDLCFTNVYADSFVIRGDEVRQIAPGQTGKIADYNYKLPDDFTGCVIAWNSNNLDSKVGGNYNYLYRLFRKSNLKPFERDISTEIYQAGSTPCNGVEGTNCYFPLQSYGFQPTNGVGYQPYRVVVLSFELLHAPATVCGPKKSTNLVKNKCVNFNFNGLTGTGVLTESNKKFLPFQQFGRDIADTTDAVRDPQTLEILDITPCSFGGVSVITPGTNTSNQVAVLYQGVNCTEVPVAIHADQLTPTWRVYSTGSNVFQTRAGCLIGAEHVNNSYECDIPIGAGICASYQTQTNSPGSASSVASQSIIAYTMSLGAENSVAYSNNSIAIPTNFTISVTTEILPVSMTKTSVDCTMYICGDSTECSNLLLQYGSFCTQLNRALTGIAVEQDKNTQEVFAQVKQIYKTPPIKDFGGFNFSQILPDPSKPSKRSFIEDLLFNKVTLADAGFIKQYGDCLGDIAARDLICAQKFNGLTVLPPLLTDEMIAQYTSALLAGTITSGWTFGAGAALQIPFAMQMAYRFNGIGVTQNVLYENQKLIANQFNSAIGKIQDSLSSTASALGKLQDVVNQNAQALNTLVKQLSSNFGAISSVLNDILSRLDPPEAEVQIDRLITGRLQSLQTYVTQQLIRAAEIRASANLAATKMSECVLGQSKRVDFCGKGYHLMSFPQSAPHGVVFLHVTYVPAQEKNFTTAPAICHDGKAHFPREGVFVSNGTHWFVTQRNFYEPQIITTDNTFVSGNCDVVIGIVNNTVYDPLQPELDS

SEQ ID NO: 91 - protein, 1121 aa, Artificial Sequence
  Synthetic: (CoV2_RBD_F486W_F460W) mutant Spike (S) protein amino acid sequence
AYTNSFTRGVYYPDKVFRSSVLHSTQDLFLPFFSNVTWFHAIHVSGTNGTKRFDNPVLPFNDGVYFASTEKSNIIRGWIFGTTLDSKTQSLLIVNNATNVVIKVCEFQFCNDPFLGVYYHKNNKSWMESEFRVYSSANNCTFEYVSQPFLMDLEGKQGNFKNLREFVFKNIDGYFKIYSKHTPINLVRDLPQGFSALEPLVDLPIGINITRFQTLLALHRSYLTPGDSSSGWTAGAAAYYVGYLQPRTFLLKYNENGTITDAVDCALDPLSETKCTLKSFTVEKGIYQTSNFRVQPTESIVRFPNITNLCPFGEVFNATRFASVYAWNRKRISNCVADYSVLYNSASFSTFKCYGVSPTKLNDLCFTNVYADSFVIRGDEVRQIAPGQTGKIADYNYKLPDDFTGCVIAWNSNNLDSKVGGNYNYLYRLFRKSNLKPFERDISTEIYQAGSTPCNGVEGWNCYFPLQSYGFQPTNGVGYQPYRVVVLSFELLHAPATVCGPKKSTNLVKNKCVNFNFNGLTGTGVLTESNKKFLPFQQFGRDIADTTDAVRDPQTLEILDITPCSFGGVSVITPGTNTSNQVAVLYQGVNCTEVPVAIHADQLTPTWRVYSTGSNVFQTRAGCLIGAEHVNNSYECDIPIGAGICASYQTQTNSPGSASSVASQSIIAYTMSLGAENSVAYSNNSIAIPTNFTISVTTEILPVSMTKTSVDCTMYICGDSTECSNLLLQYGSFCTQLNRALTGIAVEQDKNTQEVFAQVKQIYKTPPIKDFGGFNFSQILPDPSKPSKRSFIEDLLFNKVTLADAGFIKQYGDCLGDIAARDLICAQKFNGLTVLPPLLTDEMIAQYTSALLAGTITSGWTFGAGAALQIPFAMQMAYRFNGIGVTQNVLYENQKLIANQFNSAIGKIQDSLSSTASALGKLQDVVNQNAQALNTLVKQLSSNFGAISSVLNDILSRLDPPEAEVQIDRLITGRLQSLQTYVTQQLIRAAEIRASANLAATKMSECVLGQSKRVDFCGKGYHLMSFPQSAPHGVVFLHVTYVPAQEKNFTTAPAICHDGKAHFPREGVFVSNGTHWFVTQRNFYEPQIITTDNTFVSGNCDVVIGIVNNTVYDPLQPELDS

SEQ ID NO: 92 - protein, 1121 aa, Artificial Sequence
  Synthetic: (CoV2_RBD_F486Y_F460Y) mutant Spike (S) protein amino acid sequence
AYTNSFTRGVYYPDKVFRSSVLHSTQDLFLPFFSNVTWFHAIHVSGTNGTKRFDNPVLPFNDGVYFASTEKSNIIRGWIFGTTLDSKTQSLLIVNNATNVVIKVCEFQFCNDPFLGVYYHKNNKSWMESEFRVYSSANNCTFEYVSQPFLMDLEGKQGNFKNLREFVFKNIDGYFKIYSKHTPINLVRDLPQGFSALEPLVDLPIGINITRFQTLLALHRSYLTPGDSSSGWTAGAAAYYVGYLQPRTFLLKYNENGTITDAVDCALDPLSETKCTLKSFTVEKGIYQTSNFRVQPTESIVRFPNITNLCPFGEVFNATRFASVYAWNRKRISNCVADYSVLYNSASFSTFKCYGVSPTKLNDLCFTNVYADSFVIRGDEVRQIAPGQTGKIADYNYKLPDDFTGCVIAWNSNNLDSKVGGNYNYLYRLFRKSNLKPFERDISTEIYQAGSTPCNGVEGYNCYFPLQSYGFQPTNGVGYQPYRVVVLSFELLHAPATVCGPKKSTNLVKNKCVNFNFNGLTGTGVLTESNKKFLPFQQFGRDIADTTDAVRDPQTLEILDITPCSFGGVSVITPGTNTSNQVAVLYQGVNCTEVPVAIHADQLTPTWRVYSTGSNVFQTRAGCLIGAEHVNNSYECDIPIGAGICASYQTQTNSPGSASSVASQSIIAYTMSLGAENSVAYSNNSIAIPTNFTISVTTEILPVSMTKTSVDCTMYICGDSTECSNLLLQYGSFCTQLNRALTGIAVEQDKNTQEVFAQVKQIYKTPPIKDFGGFNFSQILPDPSKPSKRSFIEDLLFNKVTLADAGFIKQYGDCLGDIAARDLICAQKFNGLTVLPPLLTDEMIAQYTSALLAGTITSGWTFGAGAALQIPFAMQMAYRFNGIGVTQNVLYENQKLIANQFNSAIGKIQDSLSSTASALGKLQDVVNQNAQALNTLVKQLSSNFGAISSVLNDILSRLDPPEAEVQIDRLITGRLQSLQTYVTQQLIRAAEIRASANLAATKMSECVLGQSKRVDFCGKGYHLMSFPQSAPHGVVFLHVTYVPAQEKNFTTAPAICHDGKAHFPREGVFVSNGTHWFVTQRNFYEPQIITTDNTFVSGNCDVVIGIVNNTVYDPLQPELDS

SEQ ID NO: 93 - protein, 1121 aa, Artificial Sequence
  Synthetic: (CoV2_RBD_N487F_N461F) mutant Spike (S) protein amino acid sequence
AYTNSFTRGVYYPDKVFRSSVLHSTQDLFLPFFSNVTWFHAIHVSGTNGTKRFDNPVLPFNDGVYFASTEKSNIIRGWIFGTTLDSKTQSLLIVNNATNVVIKVCEFQFCNDPFLGVYYHKNNKSWMESEFRVYSSANNCTFEYVSQPFLMDLEGKQGNFKNLREFVFKNIDGYFKIYSKHTPINLVRDLPQGFSALEPLVDLPIGINITRFQTLLALHRSYLTPGDSSSGWTAGAAAYYVGYLQPRTFLLKYNENGTITDAVDCALDPLSETKCTLKSFTVEKGIYQTSNFRVQPTESIVRFPNITNLCPFGEVFNATRFASVYAWNRKRISNCVADYSVLYNSASFSTFKCYGVSPTKLNDLCFTNVYADSFVIRGDEVRQIAPGQTGKIADYNYKLPDDFTGCVIAWNSNNLDSKVGGNYNYLYRLFRKSNLKPFERDISTEIYQAGSTPCNGVEGFFCYFPLQSYGFQPTNGVGYQPYRVVVLSFELLHAPATVCGPKKSTNLVKNKCVNFNFNGLTGTGVLTESNKKFLPFQQFGRDIADTTDAVRDPQTLEILDITPCSFGGVSVITPGTNTSNQVAVLYQGVNCTEVPVAIHADQLTPTWRVYSTGSNVFQTRAGCLIGAEHVNNSYECDIPIGAGICASYQTQTNSPGSASSVASQSIIAYTMSLGAENSVAYSNNSIAIPTNFTISVTTEILPVSMTKTSVDCTMYICGDSTECSNLLLQYGSFCTQLNRALTGIAVEQDKNTQEVFAQVKQIYKTPPIKDFGGFNFSQILPDPSKPSKRSFIEDLLFNKVTLADAGFIKQYGDCLGDIAARDLICAQKFNGLTVLPPLLTDEMIAQYTSALLAGTITSGWTFGAGAALQIPFAMQMAYRFNGIGVTQNVLYENQKLIANQFNSAIGKIQDSLSSTASALGKLQDVVNQNAQALNTLVKQLSSNFGAISSVLNDILSRLDPPEAEVQIDRLITGRLQSLQTYVTQQLIRAAEIRASANLAATKMSECVLGQSKRVDFCGKGYHLMSFPQSAPHGVVFLHVTYVPAQEKNFTTAPAICHDGKAHFPREGVFVSNGTHWFVTQRNFYEPQIITTDNTFVSGNCDVVIGIVNNTVYDPLQPELDS

SEQ ID NO: 94 - protein, 1121 aa, Artificial Sequence
  Synthetic: (CoV2_RBD_N487L_N461L) mutant Spike (S) protein amino acid sequence
AYTNSFTRGVYYPDKVFRSSVLHSTQDLFLPFFSNVTWFHAIHVSGTNGTKRFDNPVLPFNDGVYFASTEKSNIIRGWIFGTTLDSKTQSLLIVNNATNVVIKVCEFQFCNDPFLGVYYHKNNKSWMESEFRVYSSANNCTFEYVSQPFLMDLEGKQGNFKNLREFVFKNIDGYFKIYSKHTPINLVRDLPQGFSALEPLVDLPIGINITRFQTLLALHRSYLTPGDSSSGWTAGAAAYYVGYLQPRTFLLKYNENGTITDAVDCALDPLSETKCTLKSFTVEKGIYQTSNFRVQPTESIVRFPNITNLCPFGEVFNATRFASVYAWNRKRISNCVADYSVLYNSASFSTFKCYGVSPTKLNDLCFTNVYADSFVIRGDEVRQIAPGQTGKIADYNYKLPDDFTGCVIAWNSNNLDSKVGGNYNYLYRLFRKSNLKPFERDISTEIYQAGSTPCNGVEGFLCYFPLQSYGFQPTNGVGYQPYRVVVLSFELLHAPATVCGPKKSTNLVKNKCVNFNFNGLTGTGVLTESNKKFLPFQQFGRDIADTTDAVRDPQTLEILDITPCSFGGVSVITPGTNTSNQVAVLYQGVNCTEVPVAIHADQLTPTWRVYSTGSNVFQTRAGCLIGAEHVNNSYECDIPIGAGICASYQTQTNSPGSASSVASQSIIAYTMSLGAENSVAYSNNSIAIPTNFTISVTTEILPVSMTKTSVDCTMYICGDSTECSNLLLQYGSFCTQLNRALTGIAVEQDKNTQEVFAQVKQIYKTPPIKDFGGFNFSQILPDPSKPSKRSFIEDLLFNKVTLADAGFIKQYGDCLGDIAARDLICAQKFNGLTVLPPLLTDEMIAQYTSALLAGTITSGWTFGAGAALQIPFAMQMAYRFNGIGVTQNVLYENQKLIANQFNSAIGKIQDSLSSTASALGKLQDVVNQNAQALNTLVKQLSSNFGAISSVLNDILSRLDPPEAEVQIDRLITGRLQSLQTYVTQQLIRAAEIRASANLAATKMSECVLGQSKRVDFCGKGYHLMSFPQSAPHGVVFLHVTYVPAQEKNFTTAPAICHDGKAHFPREGVFVSNGTHWFVTQRNFYEPQIITTDNTFVSGNCDVVIGIVNNTVYDPLQPELDS

SEQ ID NO: 95 - protein, 1121 aa, Artificial Sequence
  Synthetic: (CoV2_RBD_N487M_N461M) mutant Spike (S) protein amino acid sequence
AYTNSFTRGVYYPDKVFRSSVLHSTQDLFLPFFSNVTWFHAIHVSGTNGTKRFDNPVLPFNDGVYFASTEKSNIIRGWIFGTTLDSKTQSLLIVNNATNVVIKVCEFQFCNDPFLGVYYHKNNKSWMESEFRVYSSANNCTFEYVSQPFLMDLEGKQGNFKNLREFVFKNIDGYFKIYSKHTPINLVRDLPQGFSALEPLVDLPIGINITRFQTLLALHRSYLTPGDSSSGWTAGAAAYYVGYLQPRTFLLKYNENGTITDAVDCALDPLSETKCTLKSFTVEKGIYQTSNFRVQPTESIVRFPNITNLCPFGEVFNATRFASVYAWNRKRISNCVADYSVLYNSASFSTFKCYGVSPTKLNDLCFTNVYADSFVIRGDEVRQIAPGQTGKIADYNYKLPDDFTGCVIAWNSNNLDSKVGGNYNYLYRLFRKSNLKPFERDISTEIYQAGSTPCNGVEGFMCYFPLQSYGFQPTNGVGYQPYRVVVLSFELLHAPATVCGPKKSTNLVKNKCVNFNFNGLTGTGVLTESNKKFLPFQQFGRDIADTTDAVRDPQTLEILDITPCSFGGVSVITPGTNTSNQVAVLYQGVNCTEVPVAIHADQLTPTWRVYSTGSNVFQTRAGCLIGAEHVNNSYECDIPIGAGICASYQTQTNSPGSASSVASQSIIAYTMSLGAENSVAYSNNSIAIPTNFTISVTTEILPVSMTKTSVDCTMYICGDSTECSNLLLQYGSFCTQLNRALTGIAVEQDKNTQEVFAQVKQIYKTPPIKDFGGFNFSQILPDPSKPSKRSFIEDLLFNKVTLADAGFIKQYGDCLGDIAARDLICAQKFNGLTVLPPLLTDEMIAQYTSALLAGTITSGWTFGAGAALQIPFAMQMAYRFNGIGVTQNVLYENQKLIANQFNSAIGKIQDSLSSTASALGKLQDVVNQNAQALNTLVKQLSSNFGAISSVLNDILSRLDPPEAEVQIDRLITGRLQSLQTYVTQQLIRAAEIRASANLAATKMSECVLGQSKRVDFCGKGYHLMSFPQSAPHGVVFLHVTYVPAQEKNFTTAPAICHDGKAHFPREGVFVSNGTHWFVTQRNFYEPQIITTDNTFVSGNCDVVIGIVNNTVYDPLQPELDS

SEQ ID NO: 96 - protein, 1121 aa, Artificial Sequence
  Synthetic: (CoV2_RBD_N487Q_N461Q) mutant Spike (S) protein amino acid sequence
AYTNSFTRGVYYPDKVFRSSVLHSTQDLFLPFFSNVTWFHAIHVSGTNGTKRFDNPVLPFNDGVYFASTEKSNIIRGWIFGTTLDSKTQSLLIVNNATNVVIKVCEFQFCNDPFLGVYYHKNNKSWMESEFRVYSSANNCTFEYVSQPFLMDLEGKQGNFKNLREFVFKNIDGYFKIYSKHTPINLVRDLPQGFSALEPLVDLPIGINITRFQTLLALHRSYLTPGDSSSGWTAGAAAYYVGYLQPRTFLLKYNENGTITDAVDCALDPLSETKCTLKSFTVEKGIYQTSNFRVQPTESIVRFPNITNLCPFGEVFNATRFASVYAWNRKRISNCVADYSVLYNSASFSTFKCYGVSPTKLNDLCFTNVYADSFVIRGDEVRQIAPGQTGKIADYNYKLPDDFTGCVIAWNSNNLDSKVGGNYNYLYRLFRKSNLKPFERDISTEIYQAGSTPCNGVEGFQCYFPLQSYGFQPTNGVGYQPYRVVVLSFELLHAPATVCGPKKSTNLVKNKCVNFNFNGLTGTGVLTESNKKFLPFQQFGRDIADTTDAVRDPQTLEILDITPCSFGGVSVITPGTNTSNQVAVLYQGVNCTEVPVAIHADQLTPTWRVYSTGSNVFQTRAGCLIGAEHVNNSYECDIPIGAGICASYQTQTNSPGSASSVASQSIIAYTMSLGAENSVAYSNNSIAIPTNFTISVTTEILPVSMTKTSVDCTMYICGDSTECSNLLLQYGSFCTQLNRALTGIAVEQDKNTQEVFAQVKQIYKTPPIKDFGGFNFSQILPDPSKPSKRSFIEDLLFNKVTLADAGFIKQYGDCLGDIAARDLICAQKFNGLTVLPPLLTDEMIAQYTSALLAGTITSGWTFGAGAALQIPFAMQMAYRFNGIGVTQNVLYENQKLIANQFNSAIGKIQDSLSSTASALGKLQDVVNQNAQALNTLVKQLSSNFGAISSVLNDILSRLDPPEAEVQIDRLITGRLQSLQTYVTQQLIRAAEIRASANLAATKMSECVLGQSKRVDFCGKGYHLMSFPQSAPHGVVFLHVTYVPAQEKNFTTAPAICHDGKAHFPREGVFVSNGTHWFVTQRNFYEPQIITTDNTFVSGNCDVVIGIVNNTVYDPLQPELDS

SEQ ID NO: 97 - protein, 1121 aa, Artificial Sequence
  Synthetic: (CoV2_RBD_Q493A_Q467A) mutant Spike (S) protein amino acid sequence
AYTNSFTRGVYYPDKVFRSSVLHSTQDLFLPFFSNVTWFHAIHVSGTNGTKRFDNPVLPFNDGVYFASTEKSNIIRGWIFGTTLDSKTQSLLIVNNATNVVIKVCEFQFCNDPFLGVYYHKNNKSWMESEFRVYSSANNCTFEYVSQPFLMDLEGKQGNFKNLREFVFKNIDGYFKIYSKHTPINLVRDLPQGFSALEPLVDLPIGINITRFQTLLALHRSYLTPGDSSSGWTAGAAAYYVGYLQPRTFLLKYNENGTITDAVDCALDPLSETKCTLKSFTVEKGIYQTSNFRVQPTESIVRFPNITNLCPFGEVFNATRFASVYAWNRKRISNCVADYSVLYNSASFSTFKCYGVSPTKLNDLCFTNVYADSFVIRGDEVRQIAPGQTGKIADYNYKLPDDFTGCVIAWNSNNLDSKVGGNYNYLYRLFRKSNLKPFERDISTEIYQAGSTPCNGVEGFNCYFPLASYGFQPTNGVGYQPYRVVVLSFELLHAPATVCGPKKSTNLVKNKCVNFNFNGLTGTGVLTESNKKFLPFQQFGRDIADTTDAVRDPQTLEILDITPCSFGGVSVITPGTNTSNQVAVLYQGVNCTEVPVAIHADQLTPTWRVYSTGSNVFQTRAGCLIGAEHVNNSYECDIPIGAGICASYQTQTNSPGSASSVASQSIIAYTMSLGAENSVAYSNNSIAIPTNFTISVTTEILPVSMTKTSVDCTMYICGDSTECSNLLLQYGSFCTQLNRALTGIAVEQDKNTQEVFAQVKQIYKTPPIKDFGGFNFSQILPDPSKPSKRSFIEDLLFNKVTLADAGFIKQYGDCLGDIAARDLICAQKFNGLTVLPPLLTDEMIAQYTSALLAGTITSGWTFGAGAALQIPFAMQMAYRFNGIGVTQNVLYENQKLIANQFNSAIGKIQDSLSSTASALGKLQDVVNQNAQALNTLVKQLSSNFGAISSVLNDILSRLDPPEAEVQIDRLITGRLQSLQTYVTQQLIRAAEIRASANLAATKMSECVLGQSKRVDFCGKGYHLMSFPQSAPHGVVFLHVTYVPAQEKNFTTAPAICHDGKAHFPREGVFVSNGTHWFVTQRNFYEPQIITTDNTFVSGNCDVVIGIVNNTVYDPLQPELDS

SEQ ID NO: 98 - protein, 1121 aa, Artificial Sequence
  Synthetic: (CoV2_RBD_Q493Y_Q467Y) mutant Spike (S) protein amino acid sequence
AYTNSFTRGVYYPDKVFRSSVLHSTQDLFLPFFSNVTWFHAIHVSGTNGTKRFDNPVLPFNDGVYFASTEKSNIIRGWIFGTTLDSKTQSLLIVNNATNVVIKVCEFQFCNDPFLGVYYHKNNKSWMESEFRVYSSANNCTFEYVSQPFLMDLEGKQGNFKNLREFVFKNIDGYFKIYSKHTPINLVRDLPQGFSALEPLVDLPIGINITRFQTLLALHRSYLTPGDSSSGWTAGAAAYYVGYLQPRTFLLKYNENGTITDAVDCALDPLSETKCTLKSFTVEKGIYQTSNFRVQPTESIVRFPNITNLCPFGEVFNATRFASVYAWNRKRISNCVADYSVLYNSASFSTFKCYGVSPTKLNDLCFTNVYADSFVIRGDEVRQIAPGQTGKIADYNYKLPDDFTGCVIAWNSNNLDSKVGGNYNYLYRLFRKSNLKPFERDISTEIYQAGSTPCNGVEGFNCYFPLYSYGFQPTNGVGYQPYRVVVLSFELLHAPATVCGPKKSTNLVKNKCVNFNFNGLTGTGVLTESNKKFLPFQQFGRDIADTTDAVRDPQTLEILDITPCSFGGVSVITPGTNTSNQVAVLYQGVNCTEVPVAIHADQLTPTWRVYSTGSNVFQTRAGCLIGAEHVNNSYECDIPIGAGICASYQTQTNSPGSASSVASQSIIAYTMSLGAENSVAYSNNSIAIPTNFTISVTTEILPVSMTKTSVDCTMYICGDSTECSNLLLQYGSFCTQLNRALTGIAVEQDKNTQEVFAQVKQIYKTPPIKDFGGFNFSQILPDPSKPSKRSFIEDLLFNKVTLADAGFIKQYGDCLGDIAARDLICAQKFNGLTVLPPLLTDEMIAQYTSALLAGTITSGWTFGAGAALQIPFAMQMAYRFNGIGVTQNVLYENQKLIANQFNSAIGKIQDSLSSTASALGKLQDVVNQNAQALNTLVKQLSSNFGAISSVLNDILSRLDPPEAEVQIDRLITGRLQSLQTYVTQQLIRAAEIRASANLAATKMSECVLGQSKRVDFCGKGYHLMSFPQSAPHGVVFLHVTYVPAQEKNFTTAPAICHDGKAHFPREGVFVSNGTHWFVTQRNFYEPQIITTDNTFVSGNCDVVIGIVNNTVYDPLQPELDS

SEQ ID NO: 99 - protein, 1121 aa, Artificial Sequence
  Synthetic: (CoV2_RBD_Q493F_Q467F) mutant Spike (S) protein amino acid sequence
AYTNSFTRGVYYPDKVFRSSVLHSTQDLFLPFFSNVTWFHAIHVSGTNGTKRFDNPVLPFNDGVYFASTEKSNIIRGWIFGTTLDSKTQSLLIVNNATNVVIKVCEFQFCNDPFLGVYYHKNNKSWMESEFRVYSSANNCTFEYVSQPFLMDLEGKQGNFKNLREFVFKNIDGYFKIYSKHTPINLVRDLPQGFSALEPLVDLPIGINITRFQTLLALHRSYLTPGDSSSGWTAGAAAYYVGYLQPRTFLLKYNENGTITDAVDCALDPLSETKCTLKSFTVEKGIYQTSNFRVQPTESIVRFPNITNLCPFGEVFNATRFASVYAWNRKRISNCVADYSVLYNSASFSTFKCYGVSPTKLNDLCFTNVYADSFVIRGDEVRQIAPGQTGKIADYNYKLPDDFTGCVIAWNSNNLDSKVGGNYNYLYRLFRKSNLKPFERDISTEIYQAGSTPCNGVEGFNCYFPLFSYGFQPTNGVGYQPYRVVVLSFELLHAPATVCGPKKSTNLVKNKCVNFNFNGLTGTGVLTESNKKFLPFQQFGRDIADTTDAVRDPQTLEILDITPCSFGGVSVITPGTNTSNQVAVLYQGVNCTEVPVAIHADQLTPTWRVYSTGSNVFQTRAGCLIGAEHVNNSYECDIPIGAGICASYQTQTNSPGSASSVASQSIIAYTMSLGAENSVAYSNNSIAIPTNFTISVTTEILPVSMTKTSVDCTMYICGDSTECSNLLLQYGSFCTQLNRALTGIAVEQDKNTQEVFAQVKQIYKTPPIKDFGGFNFSQILPDPSKPSKRSFIEDLLFNKVTLADAGFIKQYGDCLGDIAARDLICAQKFNGLTVLPPLLTDEMIAQYTSALLAGTITSGWTFGAGAALQIPFAMQMAYRFNGIGVTQNVLYENQKLIANQFNSAIGKIQDSLSSTASALGKLQDVVNQNAQALNTLVKQLSSNFGAISSVLNDILSRLDPPEAEVQIDRLITGRLQSLQTYVTQQLIRAAEIRASANLAATKMSECVLGQSKRVDFCGKGYHLMSFPQSAPHGVVFLHVTYVPAQEKNFTTAPAICHDGKAHFPREGVFVSNGTHWFVTQRNFYEPQIITTDNTFVSGNCDVVIGIVNNTVYDPLQPELDS

SEQ ID NO: 100 - protein, 1121 aa, Artificial Sequence
  Synthetic: (CoV2_RBD_Q493R_Q467R) mutant Spike (S) protein amino acid sequence
AYTNSFTRGVYYPDKVFRSSVLHSTQDLFLPFFSNVTWFHAIHVSGTNGTKRFDNPVLPFNDGVYFASTEKSNIIRGWIFGTTLDSKTQSLLIVNNATNVVIKVCEFQFCNDPFLGVYYHKNNKSWMESEFRVYSSANNCTFEYVSQPFLMDLEGKQGNFKNLREFVFKNIDGYFKIYSKHTPINLVRDLPQGFSALEPLVDLPIGINITRFQTLLALHRSYLTPGDSSSGWTAGAAAYYVGYLQPRTFLLKYNENGTITDAVDCALDPLSETKCTLKSFTVEKGIYQTSNFRVQPTESIVRFPNITNLCPFGEVFNATRFASVYAWNRKRISNCVADYSVLYNSASFSTFKCYGVSPTKLNDLCFTNVYADSFVIRGDEVRQIAPGQTGKIADYNYKLPDDFTGCVIAWNSNNLDSKVGGNYNYLYRLFRKSNLKPFERDISTEIYQAGSTPCNGVEGFNCYFPLRSYGFQPTNGVGYQPYRVVVLSFELLHAPATVCGPKKSTNLVKNKCVNFNFNGLTGTGVLTESNKKFLPFQQFGRDIADTTDAVRDPQTLEILDITPCSFGGVSVITPGTNTSNQVAVLYQGVNCTEVPVAIHADQLTPTWRVYSTGSNVFQTRAGCLIGAEHVNNSYECDIPIGAGICASYQTQTNSPGSASSVASQSIIAYTMSLGAENSVAYSNNSIAIPTNFTISVTTEILPVSMTKTSVDCTMYICGDSTECSNLLLQYGSFCTQLNRALTGIAVEQDKNTQEVFAQVKQIYKTPPIKDFGGFNFSQILPDPSKPSKRSFIEDLLFNKVTLADAGFIKQYGDCLGDIAARDLICAQKFNGLTVLPPLLTDEMIAQYTSALLAGTITSGWTFGAGAALQIPFAMQMAYRFNGIGVTQNVLYENQKLIANQFNSAIGKIQDSLSSTASALGKLQDVVNQNAQALNTLVKQLSSNFGAISSVLNDILSRLDPPEAEVQIDRLITGRLQSLQTYVTQQLIRAAEIRASANLAATKMSECVLGQSKRVDFCGKGYHLMSFPQSAPHGVVFLHVTYVPAQEKNFTTAPAICHDGKAHFPREGVFVSNGTHWFVTQRNFYEPQIITTDNTFVSGNCDVVIGIVNNTVYDPLQPELDS

SEQ ID NO: 101 - protein, 1121 aa, Artificial Sequence
  Synthetic: (CoV2_RBD_Q493M_Q467M) mutant Spike (S) protein amino acid sequence
AYTNSFTRGVYYPDKVFRSSVLHSTQDLFLPFFSNVTWFHAIHVSGTNGTKRFDNPVLPFNDGVYFASTEKSNIIRGWIFGTTLDSKTQSLLIVNNATNVVIKVCEFQFCNDPFLGVYYHKNNKSWMESEFRVYSSANNCTFEYVSQPFLMDLEGKQGNFKNLREFVFKNIDGYFKIYSKHTPINLVRDLPQGFSALEPLVDLPIGINITRFQTLLALHRSYLTPGDSSSGWTAGAAAYYVGYLQPRTFLLKYNENGTITDAVDCALDPLSETKCTLKSFTVEKGIYQTSNFRVQPTESIVRFPNITNLCPFGEVFNATRFASVYAWNRKRISNCVADYSVLYNSASFSTFKCYGVSPTKLNDLCFTNVYADSFVIRGDEVRQIAPGQTGKIADYNYKLPDDFTGCVIAWNSNNLDSKVGGNYNYLYRLFRKSNLKPFERDISTEIYQAGSTPCNGVEGFNCYFPLMSYGFQPTNGVGYQPYRVVVLSFELLHAPATVCGPKKSTNLVKNKCVNFNFNGLTGTGVLTESNKKFLPFQQFGRDIADTTDAVRDPQTLEILDITPCSFGGVSVITPGTNTSNQVAVLYQGVNCTEVPVAIHADQLTPTWRVYSTGSNVFQTRAGCLIGAEHVNNSYECDIPIGAGICASYQTQTNSPGSASSVASQSIIAYTMSLGAENSVAYSNNSIAIPTNFTISVTTEILPVSMTKTSVDCTMYICGDSTECSNLLLQYGSFCTQLNRALTGIAVEQDKNTQEVFAQVKQIYKTPPIKDFGGFNFSQILPDPSKPSKRSFIEDLLFNKVTLADAGFIKQYGDCLGDIAARDLICAQKFNGLTVLPPLLTDEMIAQYTSALLAGTITSGWTFGAGAALQIPFAMQMAYRFNGIGVTQNVLYENQKLIANQFNSAIGKIQDSLSSTASALGKLQDVVNQNAQALNTLVKQLSSNFGAISSVLNDILSRLDPPEAEVQIDRLITGRLQSLQTYVTQQLIRAAEIRASANLAATKMSECVLGQSKRVDFCGKGYHLMSFPQSAPHGVVFLHVTYVPAQEKNFTTAPAICHDGKAHFPREGVFVSNGTHWFVTQRNFYEPQIITTDNTFVSGNCDVVIGIVNNTVYDPLQPELDS

SEQ ID NO: 102 - protein, 1121 aa, Artificial Sequence
  Synthetic: (CoV2_RBD_Q493C_Q467C) mutant Spike (S) protein amino acid sequence
AYTNSFTRGVYYPDKVFRSSVLHSTQDLFLPFFSNVTWFHAIHVSGTNGTKRFDNPVLPFNDGVYFASTEKSNIIRGWIFGTTLDSKTQSLLIVNNATNVVIKVCEFQFCNDPFLGVYYHKNNKSWMESEFRVYSSANNCTFEYVSQPFLMDLEGKQGNFKNLREFVFKNIDGYFKIYSKHTPINLVRDLPQGFSALEPLVDLPIGINITRFQTLLALHRSYLTPGDSSSGWTAGAAAYYVGYLQPRTFLLKYNENGTITDAVDCALDPLSETKCTLKSFTVEKGIYQTSNFRVQPTESIVRFPNITNLCPFGEVFNATRFASVYAWNRKRISNCVADYSVLYNSASFSTFKCYGVSPTKLNDLCFTNVYADSFVIRGDEVRQIAPGQTGKIADYNYKLPDDFTGCVIAWNSNNLDSKVGGNYNYLYRLFRKSNLKPFERDISTEIYQAGSTPCNGVEGFNCYFPLCSYGFQPTNGVGYQPYRVVVLSFELLHAPATVCGPKKSTNLVKNKCVNFNFNGLTGTGVLTESNKKFLPFQQFGRDIADTTDAVRDPQTLEILDITPCSFGGVSVITPGTNTSNQVAVLYQGVNCTEVPVAIHADQLTPTWRVYSTGSNVFQTRAGCLIGAEHVNNSYECDIPIGAGICASYQTQTNSPGSASSVASQSIIAYTMSLGAENSVAYSNNSIAIPTNFTISVTTEILPVSMTKTSVDCTMYICGDSTECSNLLLQYGSFCTQLNRALTGIAVEQDKNTQEVFAQVKQIYKTPPIKDFGGFNFSQILPDPSKPSKRSFIEDLLFNKVTLADAGFIKQYGDCLGDIAARDLICAQKFNGLTVLPPLLTDEMIAQYTSALLAGTITSGWTFGAGAALQIPFAMQMAYRFNGIGVTQNVLYENQKLIANQFNSAIGKIQDSLSSTASALGKLQDVVNQNAQALNTLVKQLSSNFGAISSVLNDILSRLDPPEAEVQIDRLITGRLQSLQTYVTQQLIRAAEIRASANLAATKMSECVLGQSKRVDFCGKGYHLMSFPQSAPHGVVFLHVTYVPAQEKNFTTAPAICHDGKAHFPREGVFVSNGTHWFVTQRNFYEPQIITTDNTFVSGNCDVVIGIVNNTVYDPLQPELDS

SEQ ID NO: 103 - protein, 1121 aa, Artificial Sequence
  Synthetic: (CoV2_RBD_Q493G_Q467G) mutant Spike (S) protein amino acid sequence
AYTNSFTRGVYYPDKVFRSSVLHSTQDLFLPFFSNVTWFHAIHVSGTNGTKRFDNPVLPFNDGVYFASTEKSNIIRGWIFGTTLDSKTQSLLIVNNATNVVIKVCEFQFCNDPFLGVYYHKNNKSWMESEFRVYSSANNCTFEYVSQPFLMDLEGKQGNFKNLREFVFKNIDGYFKIYSKHTPINLVRDLPQGFSALEPLVDLPIGINITRFQTLLALHRSYLTPGDSSSGWTAGAAAYYVGYLQPRTFLLKYNENGTITDAVDCALDPLSETKCTLKSFTVEKGIYQTSNFRVQPTESIVRFPNITNLCPFGEVFNATRFASVYAWNRKRISNCVADYSVLYNSASFSTFKCYGVSPTKLNDLCFTNVYADSFVIRGDEVRQIAPGQTGKIADYNYKLPDDFTGCVIAWNSNNLDSKVGGNYNYLYRLFRKSNLKPFERDISTEIYQAGSTPCNGVEGFNCYFPLGSYGFQPTNGVGYQPYRVVVLSFELLHAPATVCGPKKSTNLVKNKCVNFNFNGLTGTGVLTESNKKFLPFQQFGRDIADTTDAVRDPQTLEILDITPCSFGGVSVITPGTNTSNQVAVLYQGVNCTEVPVAIHADQLTPTWRVYSTGSNVFQTRAGCLIGAEHVNNSYECDIPIGAGICASYQTQTNSPGSASSVASQSIIAYTMSLGAENSVAYSNNSIAIPTNFTISVTTEILPVSMTKTSVDCTMYICGDSTECSNLLLQYGSFCTQLNRALTGIAVEQDKNTQEVFAQVKQIYKTPPIKDFGGFNFSQILPDPSKPSKRSFIEDLLFNKVTLADAGFIKQYGDCLGDIAARDLICAQKFNGLTVLPPLLTDEMIAQYTSALLAGTITSGWTFGAGAALQIPFAMQMAYRFNGIGVTQNVLYENQKLIANQFNSAIGKIQDSLSSTASALGKLQDVVNQNAQALNTLVKQLSSNFGAISSVLNDILSRLDPPEAEVQIDRLITGRLQSLQTYVTQQLIRAAEIRASANLAATKMSECVLGQSKRVDFCGKGYHLMSFPQSAPHGVVFLHVTYVPAQEKNFTTAPAICHDGKAHFPREGVFVSNGTHWFVTQRNFYEPQIITTDNTFVSGNCDVVIGIVNNTVYDPLQPELDS

SEQ ID NO: 104 - protein, 1121 aa, Artificial Sequence
  Synthetic: (CoV2_RBD_Q493V_Q467V) mutant Spike (S) protein amino acid sequence
AYTNSFTRGVYYPDKVFRSSVLHSTQDLFLPFFSNVTWFHAIHVSGTNGTKRFDNPVLPFNDGVYFASTEKSNIIRGWIFGTTLDSKTQSLLIVNNATNVVIKVCEFQFCNDPFLGVYYHKNNKSWMESEFRVYSSANNCTFEYVSQPFLMDLEGKQGNFKNLREFVFKNIDGYFKIYSKHTPINLVRDLPQGFSALEPLVDLPIGINITRFQTLLALHRSYLTPGDSSSGWTAGAAAYYVGYLQPRTFLLKYNENGTITDAVDCALDPLSETKCTLKSFTVEKGIYQTSNFRVQPTESIVRFPNITNLCPFGEVFNATRFASVYAWNRKRISNCVADYSVLYNSASFSTFKCYGVSPTKLNDLCFTNVYADSFVIRGDEVRQIAPGQTGKIADYNYKLPDDFTGCVIAWNSNNLDSKVGGNYNYLYRLFRKSNLKPFERDISTEIYQAGSTPCNGVEGFNCYFPLVSYGFQPTNGVGYQPYRVVVLSFELLHAPATVCGPKKSTNLVKNKCVNFNFNGLTGTGVLTESNKKFLPFQQFGRDIADTTDAVRDPQTLEILDITPCSFGGVSVITPGTNTSNQVAVLYQGVNCTEVPVAIHADQLTPTWRVYSTGSNVFQTRAGCLIGAEHVNNSYECDIPIGAGICASYQTQTNSPGSASSVASQSIIAYTMSLGAENSVAYSNNSIAIPTNFTISVTTEILPVSMTKTSVDCTMYICGDSTECSNLLLQYGSFCTQLNRALTGIAVEQDKNTQEVFAQVKQIYKTPPIKDFGGFNFSQILPDPSKPSKRSFIEDLLFNKVTLADAGFIKQYGDCLGDIAARDLICAQKFNGLTVLPPLLTDEMIAQYTSALLAGTITSGWTFGAGAALQIPFAMQMAYRFNGIGVTQNVLYENQKLIANQFNSAIGKIQDSLSSTASALGKLQDVVNQNAQALNTLVKQLSSNFGAISSVLNDILSRLDPPEAEVQIDRLITGRLQSLQTYVTQQLIRAAEIRASANLAATKMSECVLGQSKRVDFCGKGYHLMSFPQSAPHGVVFLHVTYVPAQEKNFTTAPAICHDGKAHFPREGVFVSNGTHWFVTQRNFYEPQIITTDNTFVSGNCDVVIGIVNNTVYDPLQPELDS

SEQ ID NO: 105 - protein, 1121 aa, Artificial Sequence
  Synthetic: (CoV2_RBD_K417N_A419T__K391N_A393T) mutant Spike (S) protein amino acid sequence
AYTNSFTRGVYYPDKVFRSSVLHSTQDLFLPFFSNVTWFHAIHVSGTNGTKRFDNPVLPFNDGVYFASTEKSNIIRGWIFGTTLDSKTQSLLIVNNATNVVIKVCEFQFCNDPFLGVYYHKNNKSWMESEFRVYSSANNCTFEYVSQPFLMDLEGKQGNFKNLREFVFKNIDGYFKIYSKHTPINLVRDLPQGFSALEPLVDLPIGINITRFQTLLALHRSYLTPGDSSSGWTAGAAAYYVGYLQPRTFLLKYNENGTITDAVDCALDPLSETKCTLKSFTVEKGIYQTSNFRVQPTESIVRFPNITNLCPFGEVFNATRFASVYAWNRKRISNCVADYSVLYNSASFSTFKCYGVSPTKLNDLCFTNVYADSFVIRGDEVRQIAPGQTGNITDYNYKLPDDFTGCVIAWNSNNLDSKVGGNYNYLYRLFRKSNLKPFERDISTEIYQAGSTPCNGVEGFNCYFPLQSYGFQPTNGVGYQPYRVVVLSFELLHAPATVCGPKKSTNLVKNKCVNFNFNGLTGTGVLTESNKKFLPFQQFGRDIADTTDAVRDPQTLEILDITPCSFGGVSVITPGTNTSNQVAVLYQGVNCTEVPVAIHADQLTPTWRVYSTGSNVFQTRAGCLIGAEHVNNSYECDIPIGAGICASYQTQTNSPGSASSVASQSIIAYTMSLGAENSVAYSNNSIAIPTNFTISVTTEILPVSMTKTSVDCTMYICGDSTECSNLLLQYGSFCTQLNRALTGIAVEQDKNTQEVFAQVKQIYKTPPIKDFGGFNFSQILPDPSKPSKRSFIEDLLFNKVTLADAGFIKQYGDCLGDIAARDLICAQKFNGLTVLPPLLTDEMIAQYTSALLAGTITSGWTFGAGAALQIPFAMQMAYRFNGIGVTQNVLYENQKLIANQFNSAIGKIQDSLSSTASALGKLQDVVNQNAQALNTLVKQLSSNFGAISSVLNDILSRLDPPEAEVQIDRLITGRLQSLQTYVTQQLIRAAEIRASANLAATKMSECVLGQSKRVDFCGKGYHLMSFPQSAPHGVVFLHVTYVPAQEKNFTTAPAICHDGKAHFPREGVFVSNGTHWFVTQRNFYEPQIITTDNTFVSGNCDVVIGIVNNTVYDPLQPELDS

SEQ ID NO: 106 - protein, 1121 aa, Artificial Sequence
  Synthetic: (CoV2_RBD_Y449N_Y451T__Y423N_Y425T) mutant Spike (S) protein amino acid sequence
AYTNSFTRGVYYPDKVFRSSVLHSTQDLFLPFFSNVTWFHAIHVSGTNGTKRFDNPVLPFNDGVYFASTEKSNIIRGWIFGTTLDSKTQSLLIVNNATNVVIKVCEFQFCNDPFLGVYYHKNNKSWMESEFRVYSSANNCTFEYVSQPFLMDLEGKQGNFKNLREFVFKNIDGYFKIYSKHTPINLVRDLPQGFSALEPLVDLPIGINITRFQTLLALHRSYLTPGDSSSGWTAGAAAYYVGYLQPRTFLLKYNENGTITDAVDCALDPLSETKCTLKSFTVEKGIYQTSNFRVQPTESIVRFPNITNLCPFGEVFNATRFASVYAWNRKRISNCVADYSVLYNSASFSTFKCYGVSPTKLNDLCFTNVYADSFVIRGDEVRQIAPGQTGKIADYNYKLPDDFTGCVIAWNSNNLDSKVGGNNNTLYRLFRKSNLKPFERDISTEIYQAGSTPCNGVEGFNCYFPLQSYGFQPTNGVGYQPYRVVVLSFELLHAPATVCGPKKSTNLVKNKCVNFNFNGLTGTGVLTESNKKFLPFQQFGRDIADTTDAVRDPQTLEILDITPCSFGGVSVITPGTNTSNQVAVLYQGVNCTEVPVAIHADQLTPTWRVYSTGSNVFQTRAGCLIGAEHVNNSYECDIPIGAGICASYQTQTNSPGSASSVASQSIIAYTMSLGAENSVAYSNNSIAIPTNFTISVTTEILPVSMTKTSVDCTMYICGDSTECSNLLLQYGSFCTQLNRALTGIAVEQDKNTQEVFAQVKQIYKTPPIKDFGGFNFSQILPDPSKPSKRSFIEDLLFNKVTLADAGFIKQYGDCLGDIAARDLICAQKFNGLTVLPPLLTDEMIAQYTSALLAGTITSGWTFGAGAALQIPFAMQMAYRFNGIGVTQNVLYENQKLIANQFNSAIGKIQDSLSSTASALGKLQDVVNQNAQALNTLVKQLSSNFGAISSVLNDILSRLDPPEAEVQIDRLITGRLQSLQTYVTQQLIRAAEIRASANLAATKMSECVLGQSKRVDFCGKGYHLMSFPQSAPHGVVFLHVTYVPAQEKNFTTAPAICHDGKAHFPREGVFVSNGTHWFVTQRNFYEPQIITTDNTFVSGNCDVVIGIVNNTVYDPLQPELDS

SEQ ID NO: 107 - protein, 1121 aa, Artificial Sequence
  Synthetic: (CoV2_RBD_Y453N_L455T__Y427N_L429T) mutant Spike (S) protein amino acid sequence
AYTNSFTRGVYYPDKVFRSSVLHSTQDLFLPFFSNVTWFHAIHVSGTNGTKRFDNPVLPFNDGVYFASTEKSNIIRGWIFGTTLDSKTQSLLIVNNATNVVIKVCEFQFCNDPFLGVYYHKNNKSWMESEFRVYSSANNCTFEYVSQPFLMDLEGKQGNFKNLREFVFKNIDGYFKIYSKHTPINLVRDLPQGFSALEPLVDLPIGINITRFQTLLALHRSYLTPGDSSSGWTAGAAAYYVGYLQPRTFLLKYNENGTITDAVDCALDPLSETKCTLKSFTVEKGIYQTSNFRVQPTESIVRFPNITNLCPFGEVFNATRFASVYAWNRKRISNCVADYSVLYNSASFSTFKCYGVSPTKLNDLCFTNVYADSFVIRGDEVRQIAPGQTGKIADYNYKLPDDFTGCVIAWNSNNLDSKVGGNYNYLNRTFRKSNLKPFERDISTEIYQAGSTPCNGVEGFNCYFPLQSYGFQPTNGVGYQPYRVVVLSFELLHAPATVCGPKKSTNLVKNKCVNFNFNGLTGTGVLTESNKKFLPFQQFGRDIADTTDAVRDPQTLEILDITPCSFGGVSVITPGTNTSNQVAVLYQGVNCTEVPVAIHADQLTPTWRVYSTGSNVFQTRAGCLIGAEHVNNSYECDIPIGAGICASYQTQTNSPGSASSVASQSIIAYTMSLGAENSVAYSNNSIAIPTNFTISVTTEILPVSMTKTSVDCTMYICGDSTECSNLLLQYGSFCTQLNRALTGIAVEQDKNTQEVFAQVKQIYKTPPIKDFGGFNFSQILPDPSKPSKRSFIEDLLFNKVTLADAGFIKQYGDCLGDIAARDLICAQKFNGLTVLPPLLTDEMIAQYTSALLAGTITSGWTFGAGAALQIPFAMQMAYRFNGIGVTQNVLYENQKLIANQFNSAIGKIQDSLSSTASALGKLQDVVNQNAQALNTLVKQLSSNFGAISSVLNDILSRLDPPEAEVQIDRLITGRLQSLQTYVTQQLIRAAEIRASANLAATKMSECVLGQSKRVDFCGKGYHLMSFPQSAPHGVVFLHVTYVPAQEKNFTTAPAICHDGKAHFPREGVFVSNGTHWFVTQRNFYEPQIITTDNTFVSGNCDVVIGIVNNTVYDPLQPELDS

SEQ ID NO: 108 - protein, 1121 aa, Artificial Sequence
  Synthetic: (CoV2_RBD_L455N_R457T__L429N_R431T) mutant Spike (S) protein amino acid sequence
AYTNSFTRGVYYPDKVFRSSVLHSTQDLFLPFFSNVTWFHAIHVSGTNGTKRFDNPVLPFNDGVYFASTEKSNIIRGWIFGTTLDSKTQSLLIVNNATNVVIKVCEFQFCNDPFLGVYYHKNNKSWMESEFRVYSSANNCTFEYVSQPFLMDLEGKQGNFKNLREFVFKNIDGYFKIYSKHTPINLVRDLPQGFSALEPLVDLPIGINITRFQTLLALHRSYLTPGDSSSGWTAGAAAYYVGYLQPRTFLLKYNENGTITDAVDCALDPLSETKCTLKSFTVEKGIYQTSNFRVQPTESIVRFPNITNLCPFGEVFNATRFASVYAWNRKRISNCVADYSVLYNSASFSTFKCYGVSPTKLNDLCFTNVYADSFVIRGDEVRQIAPGQTGKIADYNYKLPDDFTGCVIAWNSNNLDSKVGGNYNYLYRNFTKSNLKPFERDISTEIYQAGSTPCNGVEGFNCYFPLQSYGFQPTNGVGYQPYRVVVLSFELLHAPATVCGPKKSTNLVKNKCVNFNFNGLTGTGVLTESNKKFLPFQQFGRDIADTTDAVRDPQTLEILDITPCSFGGVSVITPGTNTSNQVAVLYQGVNCTEVPVAIHADQLTPTWRVYSTGSNVFQTRAGCLIGAEHVNNSYECDIPIGAGICASYQTQTNSPGSASSVASQSIIAYTMSLGAENSVAYSNNSIAIPTNFTISVTTEILPVSMTKTSVDCTMYICGDSTECSNLLLQYGSFCTQLNRALTGIAVEQDKNTQEVFAQVKQIYKTPPIKDFGGFNFSQILPDPSKPSKRSFIEDLLFNKVTLADAGFIKQYGDCLGDIAARDLICAQKFNGLTVLPPLLTDEMIAQYTSALLAGTITSGWTFGAGAALQIPFAMQMAYRFNGIGVTQNVLYENQKLIANQFNSAIGKIQDSLSSTASALGKLQDVVNQNAQALNTLVKQLSSNFGAISSVLNDILSRLDPPEAEVQIDRLITGRLQSLQTYVTQQLIRAAEIRASANLAATKMSECVLGQSKRVDFCGKGYHLMSFPQSAPHGVVFLHVTYVPAQEKNFTTAPAICHDGKAHFPREGVFVSNGTHWFVTQRNFYEPQIITTDNTFVSGNCDVVIGIVNNTVYDPLQPELDS

SEQ ID NO: 109 - protein, 1121 aa, Artificial Sequence
  Synthetic: (CoV2_RBD_F456N_K458T__F430N_K432T) mutant Spike (S) protein amino acid sequence
AYTNSFTRGVYYPDKVFRSSVLHSTQDLFLPFFSNVTWFHAIHVSGTNGTKRFDNPVLPFNDGVYFASTEKSNIIRGWIFGTTLDSKTQSLLIVNNATNVVIKVCEFQFCNDPFLGVYYHKNNKSWMESEFRVYSSANNCTFEYVSQPFLMDLEGKQGNFKNLREFVFKNIDGYFKIYSKHTPINLVRDLPQGFSALEPLVDLPIGINITRFQTLLALHRSYLTPGDSSSGWTAGAAAYYVGYLQPRTFLLKYNENGTITDAVDCALDPLSETKCTLKSFTVEKGIYQTSNFRVQPTESIVRFPNITNLCPFGEVFNATRFASVYAWNRKRISNCVADYSVLYNSASFSTFKCYGVSPTKLNDLCFTNVYADSFVIRGDEVRQIAPGQTGKIADYNYKLPDDFTGCVIAWNSNNLDSKVGGNYNYLYRLNRTSNLKPFERDISTEIYQAGSTPCNGVEGFNCYFPLQSYGFQPTNGVGYQPYRVVVLSFELLHAPATVCGPKKSTNLVKNKCVNFNFNGLTGTGVLTESNKKFLPFQQFGRDIADTTDAVRDPQTLEILDITPCSFGGVSVITPGTNTSNQVAVLYQGVNCTEVPVAIHADQLTPTWRVYSTGSNVFQTRAGCLIGAEHVNNSYECDIPIGAGICASYQTQTNSPGSASSVASQSIIAYTMSLGAENSVAYSNNSIAIPTNFTISVTTEILPVSMTKTSVDCTMYICGDSTECSNLLLQYGSFCTQLNRALTGIAVEQDKNTQEVFAQVKQIYKTPPIKDFGGFNFSQILPDPSKPSKRSFIEDLLFNKVTLADAGFIKQYGDCLGDIAARDLICAQKFNGLTVLPPLLTDEMIAQYTSALLAGTITSGWTFGAGAALQIPFAMQMAYRFNGIGVTQNVLYENQKLIANQFNSAIGKIQDSLSSTASALGKLQDVVNQNAQALNTLVKQLSSNFGAISSVLNDILSRLDPPEAEVQIDRLITGRLQSLQTYVTQQLIRAAEIRASANLAATKMSECVLGQSKRVDFCGKGYHLMSFPQSAPHGVVFLHVTYVPAQEKNFTTAPAICHDGKAHFPREGVFVSNGTHWFVTQRNFYEPQIITTDNTFVSGNCDVVIGIVNNTVYDPLQPELDS

SEQ ID NO: 110 - protein, 1121 aa, Artificial Sequence
  Synthetic: (CoV2_RBD_Y473N_A475T__Y447N_A449T) mutant Spike (S) protein amino acid sequence
AYTNSFTRGVYYPDKVFRSSVLHSTQDLFLPFFSNVTWFHAIHVSGTNGTKRFDNPVLPFNDGVYFASTEKSNIIRGWIFGTTLDSKTQSLLIVNNATNVVIKVCEFQFCNDPFLGVYYHKNNKSWMESEFRVYSSANNCTFEYVSQPFLMDLEGKQGNFKNLREFVFKNIDGYFKIYSKHTPINLVRDLPQGFSALEPLVDLPIGINITRFQTLLALHRSYLTPGDSSSGWTAGAAAYYVGYLQPRTFLLKYNENGTITDAVDCALDPLSETKCTLKSFTVEKGIYQTSNFRVQPTESIVRFPNITNLCPFGEVFNATRFASVYAWNRKRISNCVADYSVLYNSASFSTFKCYGVSPTKLNDLCFTNVYADSFVIRGDEVRQIAPGQTGKIADYNYKLPDDFTGCVIAWNSNNLDSKVGGNYNYLYRLFRKSNLKPFERDISTEINQTGSTPCNGVEGFNCYFPLQSYGFQPTNGVGYQPYRVVVLSFELLHAPATVCGPKKSTNLVKNKCVNFNFNGLTGTGVLTESNKKFLPFQQFGRDIADTTDAVRDPQTLEILDITPCSFGGVSVITPGTNTSNQVAVLYQGVNCTEVPVAIHADQLTPTWRVYSTGSNVFQTRAGCLIGAEHVNNSYECDIPIGAGICASYQTQTNSPGSASSVASQSIIAYTMSLGAENSVAYSNNSIAIPTNFTISVTTEILPVSMTKTSVDCTMYICGDSTECSNLLLQYGSFCTQLNRALTGIAVEQDKNTQEVFAQVKQIYKTPPIKDFGGFNFSQILPDPSKPSKRSFIEDLLFNKVTLADAGFIKQYGDCLGDIAARDLICAQKFNGLTVLPPLLTDEMIAQYTSALLAGTITSGWTFGAGAALQIPFAMQMAYRFNGIGVTQNVLYENQKLIANQFNSAIGKIQDSLSSTASALGKLQDVVNQNAQALNTLVKQLSSNFGAISSVLNDILSRLDPPEAEVQIDRLITGRLQSLQTYVTQQLIRAAEIRASANLAATKMSECVLGQSKRVDFCGKGYHLMSFPQSAPHGVVFLHVTYVPAQEKNFTTAPAICHDGKAHFPREGVFVSNGTHWFVTQRNFYEPQIITTDNTFVSGNCDVVIGIVNNTVYDPLQPELDS

SEQ ID NO: 111 - protein, 1121 aa, Artificial Sequence
  Synthetic: (CoV2_RBD_A475N_S477T__A449N_S451T) mutant Spike (S) protein amino acid sequence
AYTNSFTRGVYYPDKVFRSSVLHSTQDLFLPFFSNVTWFHAIHVSGTNGTKRFDNPVLPFNDGVYFASTEKSNIIRGWIFGTTLDSKTQSLLIVNNATNVVIKVCEFQFCNDPFLGVYYHKNNKSWMESEFRVYSSANNCTFEYVSQPFLMDLEGKQGNFKNLREFVFKNIDGYFKIYSKHTPINLVRDLPQGFSALEPLVDLPIGINITRFQTLLALHRSYLTPGDSSSGWTAGAAAYYVGYLQPRTFLLKYNENGTITDAVDCALDPLSETKCTLKSFTVEKGIYQTSNFRVQPTESIVRFPNITNLCPFGEVFNATRFASVYAWNRKRISNCVADYSVLYNSASFSTFKCYGVSPTKLNDLCFTNVYADSFVIRGDEVRQIAPGQTGKIADYNYKLPDDFTGCVIAWNSNNLDSKVGGNYNYLYRLFRKSNLKPFERDISTEIYQNGTTPCNGVEGFNCYFPLQSYGFQPTNGVGYQPYRVVVLSFELLHAPATVCGPKKSTNLVKNKCVNFNFNGLTGTGVLTESNKKFLPFQQFGRDIADTTDAVRDPQTLEILDITPCSFGGVSVITPGTNTSNQVAVLYQGVNCTEVPVAIHADQLTPTWRVYSTGSNVFQTRAGCLIGAEHVNNSYECDIPIGAGICASYQTQTNSPGSASSVASQSIIAYTMSLGAENSVAYSNNSIAIPTNFTISVTTEILPVSMTKTSVDCTMYICGDSTECSNLLLQYGSFCTQLNRALTGIAVEQDKNTQEVFAQVKQIYKTPPIKDFGGFNFSQILPDPSKPSKRSFIEDLLFNKVTLADAGFIKQYGDCLGDIAARDLICAQKFNGLTVLPPLLTDEMIAQYTSALLAGTITSGWTFGAGAALQIPFAMQMAYRFNGIGVTQNVLYENQKLIANQFNSAIGKIQDSLSSTASALGKLQDVVNQNAQALNTLVKQLSSNFGAISSVLNDILSRLDPPEAEVQIDRLITGRLQSLQTYVTQQLIRAAEIRASANLAATKMSECVLGQSKRVDFCGKGYHLMSFPQSAPHGVVFLHVTYVPAQEKNFTTAPAICHDGKAHFPREGVFVSNGTHWFVTQRNFYEPQIITTDNTFVSGNCDVVIGIVNNTVYDPLQPELDS

SEQ ID NO: 112 - protein, 1121 aa, Artificial Sequence
  Synthetic: (CoV2_RBD_G476N__G450N) mutant Spike (S) protein amino acid sequence
AYTNSFTRGVYYPDKVFRSSVLHSTQDLFLPFFSNVTWFHAIHVSGTNGTKRFDNPVLPFNDGVYFASTEKSNIIRGWIFGTTLDSKTQSLLIVNNATNVVIKVCEFQFCNDPFLGVYYHKNNKSWMESEFRVYSSANNCTFEYVSQPFLMDLEGKQGNFKNLREFVFKNIDGYFKIYSKHTPINLVRDLPQGFSALEPLVDLPIGINITRFQTLLALHRSYLTPGDSSSGWTAGAAAYYVGYLQPRTFLLKYNENGTITDAVDCALDPLSETKCTLKSFTVEKGIYQTSNFRVQPTESIVRFPNITNLCPFGEVFNATRFASVYAWNRKRISNCVADYSVLYNSASFSTFKCYGVSPTKLNDLCFTNVYADSFVIRGDEVRQIAPGQTGKIADYNYKLPDDFTGCVIAWNSNNLDSKVGGNYNYLYRLFRKSNLKPFERDISTEIYQANSTPCNGVEGFNCYFPLQSYGFQPTNGVGYQPYRVVVLSFELLHAPATVCGPKKSTNLVKNKCVNFNFNGLTGTGVLTESNKKFLPFQQFGRDIADTTDAVRDPQTLEILDITPCSFGGVSVITPGTNTSNQVAVLYQGVNCTEVPVAIHADQLTPTWRVYSTGSNVFQTRAGCLIGAEHVNNSYECDIPIGAGICASYQTQTNSPGSASSVASQSIIAYTMSLGAENSVAYSNNSIAIPTNFTISVTTEILPVSMTKTSVDCTMYICGDSTECSNLLLQYGSFCTQLNRALTGIAVEQDKNTQEVFAQVKQIYKTPPIKDFGGFNFSQILPDPSKPSKRSFIEDLLFNKVTLADAGFIKQYGDCLGDIAARDLICAQKFNGLTVLPPLLTDEMIAQYTSALLAGTITSGWTFGAGAALQIPFAMQMAYRFNGIGVTQNVLYENQKLIANQFNSAIGKIQDSLSSTASALGKLQDVVNQNAQALNTLVKQLSSNFGAISSVLNDILSRLDPPEAEVQIDRLITGRLQSLQTYVTQQLIRAAEIRASANLAATKMSECVLGQSKRVDFCGKGYHLMSFPQSAPHGVVFLHVTYVPAQEKNFTTAPAICHDGKAHFPREGVFVSNGTHWFVTQRNFYEPQIITTDNTFVSGNCDVVIGIVNNTVYDPLQPELDS

SEQ ID NO: 113 - protein, 1121 aa, Artificial Sequence
  Synthetic: (CoV2_RBD_Y489T__Y463T) mutant Spike (S) protein amino acid sequence
AYTNSFTRGVYYPDKVFRSSVLHSTQDLFLPFFSNVTWFHAIHVSGTNGTKRFDNPVLPFNDGVYFASTEKSNIIRGWIFGTTLDSKTQSLLIVNNATNVVIKVCEFQFCNDPFLGVYYHKNNKSWMESEFRVYSSANNCTFEYVSQPFLMDLEGKQGNFKNLREFVFKNIDGYFKIYSKHTPINLVRDLPQGFSALEPLVDLPIGINITRFQTLLALHRSYLTPGDSSSGWTAGAAAYYVGYLQPRTFLLKYNENGTITDAVDCALDPLSETKCTLKSFTVEKGIYQTSNFRVQPTESIVRFPNITNLCPFGEVFNATRFASVYAWNRKRISNCVADYSVLYNSASFSTFKCYGVSPTKLNDLCFTNVYADSFVIRGDEVRQIAPGQTGKIADYNYKLPDDFTGCVIAWNSNNLDSKVGGNYNYLYRLFRKSNLKPFERDISTEIYQAGSTPCNGVEGFNCTFPLQSYGFQPTNGVGYQPYRVVVLSFELLHAPATVCGPKKSTNLVKNKCVNFNFNGLTGTGVLTESNKKFLPFQQFGRDIADTTDAVRDPQTLEILDITPCSFGGVSVITPGTNTSNQVAVLYQGVNCTEVPVAIHADQLTPTWRVYSTGSNVFQTRAGCLIGAEHVNNSYECDIPIGAGICASYQTQTNSPGSASSVASQSIIAYTMSLGAENSVAYSNNSIAIPTNFTISVTTEILPVSMTKTSVDCTMYICGDSTECSNLLLQYGSFCTQLNRALTGIAVEQDKNTQEVFAQVKQIYKTPPIKDFGGFNFSQILPDPSKPSKRSFIEDLLFNKVTLADAGFIKQYGDCLGDIAARDLICAQKFNGLTVLPPLLTDEMIAQYTSALLAGTITSGWTFGAGAALQIPFAMQMAYRFNGIGVTQNVLYENQKLIANQFNSAIGKIQDSLSSTASALGKLQDVVNQNAQALNTLVKQLSSNFGAISSVLNDILSRLDPPEAEVQIDRLITGRLQSLQTYVTQQLIRAAEIRASANLAATKMSECVLGQSKRVDFCGKGYHLMSFPQSAPHGVVFLHVTYVPAQEKNFTTAPAICHDGKAHFPREGVFVSNGTHWFVTQRNFYEPQIITTDNTFVSGNCDVVIGIVNNTVYDPLQPELDS

SEQ ID NO: 114 - protein, 1121 aa, Artificial Sequence
  Synthetic: (CoV2_RBD_Q493N_Y495T__Q467N_Y469T) mutant Spike (S) protein amino acid sequence
AYTNSFTRGVYYPDKVFRSSVLHSTQDLFLPFFSNVTWFHAIHVSGTNGTKRFDNPVLPFNDGVYFASTEKSNIIRGWIFGTTLDSKTQSLLIVNNATNVVIKVCEFQFCNDPFLGVYYHKNNKSWMESEFRVYSSANNCTFEYVSQPFLMDLEGKQGNFKNLREFVFKNIDGYFKIYSKHTPINLVRDLPQGFSALEPLVDLPIGINITRFQTLLALHRSYLTPGDSSSGWTAGAAAYYVGYLQPRTFLLKYNENGTITDAVDCALDPLSETKCTLKSFTVEKGIYQTSNFRVQPTESIVRFPNITNLCPFGEVFNATRFASVYAWNRKRISNCVADYSVLYNSASFSTFKCYGVSPTKLNDLCFTNVYADSFVIRGDEVRQIAPGQTGKIADYNYKLPDDFTGCVIAWNSNNLDSKVGGNYNYLYRLFRKSNLKPFERDISTEIYQAGSTPCNGVEGFNCYFPLNSTGFQPTNGVGYQPYRVVVLSFELLHAPATVCGPKKSTNLVKNKCVNFNFNGLTGTGVLTESNKKFLPFQQFGRDIADTTDAVRDPQTLEILDITPCSFGGVSVITPGTNTSNQVAVLYQGVNCTEVPVAIHADQLTPTWRVYSTGSNVFQTRAGCLIGAEHVNNSYECDIPIGAGICASYQTQTNSPGSASSVASQSIIAYTMSLGAENSVAYSNNSIAIPTNFTISVTTEILPVSMTKTSVDCTMYICGDSTECSNLLLQYGSFCTQLNRALTGIAVEQDKNTQEVFAQVKQIYKTPPIKDFGGFNFSQILPDPSKPSKRSFIEDLLFNKVTLADAGFIKQYGDCLGDIAARDLICAQKFNGLTVLPPLLTDEMIAQYTSALLAGTITSGWTFGAGAALQIPFAMQMAYRFNGIGVTQNVLYENQKLIANQFNSAIGKIQDSLSSTASALGKLQDVVNQNAQALNTLVKQLSSNFGAISSVLNDILSRLDPPEAEVQIDRLITGRLQSLQTYVTQQLIRAAEIRASANLAATKMSECVLGQSKRVDFCGKGYHLMSFPQSAPHGVVFLHVTYVPAQEKNFTTAPAICHDGKAHFPREGVFVSNGTHWFVTQRNFYEPQIITTDNTFVSGNCDVVIGIVNNTVYDPLQPELDS

SEQ ID NO: 115 - protein, 1255 aa, Human Severe Acute Respiratory Syndrome (SARS) coronavirus
MFIFLLFLTLTSGSDLDRCTTFDDVQAPNYTQHTSSMRGVYYPDEIFRSDTLYLTQDLFLPFYSNVTGFHTINHTFGNPVIPFKDGIYFAATEKSNVVRGWVFGSTMNNKSQSVIIINNSTNVVIRACNFELCDNPFFAVSKPMGTQTHTMIFDNAFNCTFEYISDAFSLDVSEKSGNFKHLREFVFKNKDGFLYVYKGYQPIDVVRDLPSGFNTLKPIFKLPLGINITNFRAILTAFSPAQDIWGTSAAAYFVGYLKPTTFMLKYDENGTITDAVDCSQNPLAELKCSVKSFEIDKGIYQTSNFRVVPSGDVVRFPNITNLCPFGEVFNATKFPSVYAWERKKISNCVADYSVLYNSTFFSTFKCYGVSATKLNDLCFSNVYADSFVVKGDDVRQIAPGQTGVIADYNYKLPDDFMGCVLAWNTRNIDATSTGNYNYKYRYLRHGKLRPFERDISNVPFSPDGKPCTPPALNCYWPLNDYGFYTTTGIGYQPYRVVVLSFELLNAPATVCGPKLSTDLIKNQCVNFNFNGLTGTGVLTPSSKRFQPFQQFGRDVSDFTDSVRDPKTSEILDISPCSFGGVSVITPGTNASSEVAVLYQDVNCTDVSTAIHADQLTPAWRIYSTGNNVFQTQAGCLIGAEHVDTSYECDIPIGAGICASYHTVSLLRSTSQKSIVAYTMSLGADSSIAYSNNTIAIPTNFSISITTEVMPVSMAKTSVDCNMYICGDSTECANLLLQYGSFCTQLNRALSGIAAEQDRNTREVFAQVKQMYKTPTLKYFGGFNFSQILPDPLKPTKRSFIEDLLFNKVTLADAGFMKQYGECLGDINARDLICAQKFNGLTVLPPLLTDDMIAAYTAALVSGTATAGWTFGAGAALQIPFAMQMAYRFNGIGVTQNVLYENQKQIANQFNKAISQIQESLTTTSTALGKLQDVVNQNAQALNTLVKQLSSNFGAISSVLNDILSRLDKVEAEVQIDRLITGRLQSLQTYVTQQLIRAAEIRASANLAATKMSECVLGQSKRVDFCGKGYHLMSFPQAAPHGVVFLHVTYVPSQERNFTTAPAICHEGKAYFPREGVFVFNGTSWFITQRNFFSPQIITTDNTFVSGNCDVVIGIINNTVYDPLQPELDSFKEELDKYFKNHTSPDVDLGDISGINASVVNIQKEIDRLNEVAKNLNESLIDLQELGKYEQYIKWPWYVWLGFIAGLIAIVMVTILLCCMTSCCSCLKGACSCGSCCKFDEDDSEPVLKGVKLHYT

SEQ ID NO: 116 - protein, 1242 aa, Human Severe Acute Respiratory Syndrome (SARS) coronavirus
SDLDRCTTFDDVQAPNYTQHTSSMRGVYYPDEIFRSDTLYLTQDLFLPFYSNVTGFHTINHTFGNPVIPFKDGIYFAATEKSNVVRGWVFGSTMNNKSQSVIIINNSTNVVIRACNFELCDNPFFAVSKPMGTQTHTMIFDNAFNCTFEYISDAFSLDVSEKSGNFKHLREFVFKNKDGFLYVYKGYQPIDVVRDLPSGFNTLKPIFKLPLGINITNFRAILTAFSPAQDIWGTSAAAYFVGYLKPTTFMLKYDENGTITDAVDCSQNPLAELKCSVKSFEIDKGIYQTSNFRVVPSGDVVRFPNITNLCPFGEVFNATKFPSVYAWERKKISNCVADYSVLYNSTFFSTFKCYGVSATKLNDLCFSNVYADSFVVKGDDVRQIAPGQTGVIADYNYKLPDDFMGCVLAWNTRNIDATSTGNYNYKYRYLRHGKLRPFERDISNVPFSPDGKPCTPPALNCYWPLNDYGFYTTTGIGYQPYRVVVLSFELLNAPATVCGPKLSTDLIKNQCVNFNFNGLTGTGVLTPSSKRFQPFQQFGRDVSDFTDSVRDPKTSEILDISPCSFGGVSVITPGTNASSEVAVLYQDVNCTDVSTAIHADQLTPAWRIYSTGNNVFQTQAGCLIGAEHVDTSYECDIPIGAGICASYHTVSLLRSTSQKSIVAYTMSLGADSSIAYSNNTIAIPTNFSISITTEVMPVSMAKTSVDCNMYICGDSTECANLLLQYGSFCTQLNRALSGIAAEQDRNTREVFAQVKQMYKTPTLKYFGGFNFSQILPDPLKPTKRSFIEDLLFNKVTLADAGFMKQYGECLGDINARDLICAQKFNGLTVLPPLLTDDMIAAYTAALVSGTATAGWTFGAGAALQIPFAMQMAYRFNGIGVTQNVLYENQKQIANQFNKAISQIQESLTTTSTALGKLQDVVNQNAQALNTLVKQLSSNFGAISSVLNDILSRLDKVEAEVQIDRLITGRLQSLQTYVTQQLIRAAEIRASANLAATKMSECVLGQSKRVDFCGKGYHLMSFPQAAPHGVVFLHVTYVPSQERNFTTAPAICHEGKAYFPREGVFVFNGTSWFITQRNFFSPQIITTDNTFVSGNCDVVIGIINNTVYDPLQPELDSFKEELDKYFKNHTSPDVDLGDISGINASVVNIQKEIDRLNEVAKNLNESLIDLQELGKYEQYIKWPWYVWLGFIAGLIAIVMVTILLCCMTSCCSCLKGACSCGSCCKFDEDDSEPVLKGVKLHYT

SEQ ID NO: 117 - protein, 1353 aa, Middle East Respiratory Syndrome (MERS) coronavirus (MERS-CoV)
MIHSVFLLMFLLTPTESYVDVGPDSVKSACIEVDIQQTFFDKTWPRPIDVSKADGIIYPQGRTYSNITITYQGLFPYQGDHGDMYVYSAGHATGTTPQKLFVANYSQDVKQFANGFVVRIGAAANSTGTVIISPSTSATIRKIYPAFMLGSSVGNFSDGKMGRFFNHTLVLLPDGCGTLLRAFYCILEPRSGNHCPAGNSYTSFATYHTPATDCSDGNYNRNASLNSFKEYFNLRNCTFMYTYNITEDEILEWFGITQTAQGVHLFSSRYVDLYGGNMFQFATLPVYDTIKYYSIIPHSIRSIQSDRKAWAAFYVYKLQPLTFLLDFSVDGYIRRAIDCGFNDLSQLHCSYESFDVESGVYSVSSFEAKPSGSVVEQAEGVECDFSPLLSGTPPQVYNFKRLVFTNCNYNLTKLLSLFSVNDFTCSQISPAAIASNCYSSLILDYFSYPLSMKSDLSVSSAGPISQFNYKQSFSNPTCLILATVPHNLTTITKPLKYSYINKCSRLLSDDRTEVPQLVNANQYSPCVSIVPSTVWEDGDYYRKQLSPLEGGGWLVASGSTVAMTEQLQMGFGITVQYGTDTNSVCPKLEFANDTKIASQLGNCVEYSLYGVSGRGVFQNCTAVGVRQQRFVYDAYQNLVGYYSDDGNYYCLRACVSVPVSVIYDKETKTHATLFGSVACEHISSTMSQYSRSTRSMLKRRDSTYGPLQTPVGCVLGLVNSSLFVEDCKLPLGQSLCALPDTPSTLTPRSVRSVPGEMRLASIAFNHPIQVDQLNSSYFKLSIPTNFSFGVTQEYIQTTIQKVTVDCKQYVCNGFQKCEQLLREYGQFCSKINQALHGANLRQDDSVRNLFASVKSSQSSPIIPGFGGDFNLTLLEPVSISTGSRSARSAIEDLLFDKVTIADPGYMQGYDDCMQQGPASARDLICAQYVAGYKVLPPLMDVNMEAAYTSSLLGSIAGVGWTAGLSSFAAIPFAQSIFYRLNGVGITQQVLSENQKLIANKFNQALGAMQTGFTTTNEAFQKVQDAVNNNAQALSKLASELSNTFGAISASIGDIIQRLDVLEQDAQIDRLINGRLTTLNAFVAQQLVRSESAALSAQLAKDKVNECVKAQSKRSGFCGQGTHIVSFVVNAPNGLYFMHVGYYPSNHIEVVSAYGLCDAANPTNCIAPVNGYFIKTNNTRIVDEWSYTGSSFYAPEPITSLNTKYVAPQVTYQNISTNLPPPLLGNSTGIDFQDELDEFFKNVSTSIPNFGSLTQINTTLLDLTYEMLSLQQVVKALNESYIDLKELGNYTYYNKWPWYIWLGFIAGLVALALCVFFILCCTGCGTNCMGKLKCNRCCDRYEEYDLEPHKVHVH

SEQ ID NO: 118 - protein, 1335 aa, Middle East Respiratory Syndrome (MERS) coronavirus (MERS-CoV)
VDVGPDSVKSACIEVDIQQTFFDKTWPRPIDVSKADGIIYPQGRTYSNITITYQGLFPYQGDHGDMYVYSAGHATGTTPQKLFVANYSQDVKQFANGFVVRIGAAANSTGTVIISPSTSATIRKIYPAFMLGSSVGNFSDGKMGRFFNHTLVLLPDGCGTLLRAFYCILEPRSGNHCPAGNSYTSFATYHTPATDCSDGNYNRNASLNSFKEYFNLRNCTFMYTYNITEDEILEWFGITQTAQGVHLFSSRYVDLYGGNMFQFATLPVYDTIKYYSIIPHSIRSIQSDRKAWAAFYVYKLQPLTFLLDFSVDGYIRRAIDCGFNDLSQLHCSYESFDVESGVYSVSSFEAKPSGSVVEQAEGVECDFSPLLSGTPPQVYNFKRLVFTNCNYNLTKLLSLFSVNDFTCSQISPAAIASNCYSSLILDYFSYPLSMKSDLSVSSAGPISQFNYKQSFSNPTCLILATVPHNLTTITKPLKYSYINKCSRLLSDDRTEVPQLVNANQYSPCVSIVPSTVWEDGDYYRKQLSPLEGGGWLVASGSTVAMTEQLQMGFGITVQYGTDTNSVCPKLEFANDTKIASQLGNCVEYSLYGVSGRGVFQNCTAVGVRQQRFVYDAYQNLVGYYSDDGNYYCLRACVSVPVSVIYDKETKTHATLFGSVACEHISSTMSQYSRSTRSMLKRRDSTYGPLQTPVGCVLGLVNSSLFVEDCKLPLGQSLCALPDTPSTLTPRSVRSVPGEMRLASIAFNHPIQVDQLNSSYFKLSIPTNFSFGVTQEYIQTTIQKVTVDCKQYVCNGFQKCEQLLREYGQFCSKINQALHGANLRQDDSVRNLFASVKSSQSSPIIPGFGGDFNLTLLEPVSISTGSRSARSAIEDLLFDKVTIADPGYMQGYDDCMQQGPASARDLICAQYVAGYKVLPPLMDVNMEAAYTSSLLGSIAGVGWTAGLSSFAAIPFAQSIFYRLNGVGITQQVLSENQKLIANKFNQALGAMQTGFTTTNEAFQKVQDAVNNNAQALSKLASELSNTFGAISASIGDIIQRLDVLEQDAQIDRLINGRLTTLNAFVAQQLVRSESAALSAQLAKDKVNECVKAQSKRSGFCGQGTHIVSFVVNAPNGLYFMHVGYYPSNHIEVVSAYGLCDAANPTNCIAPVNGYFIKTNNTRIVDEWSYTGSSFYAPEPITSLNTKYVAPQVTYQNISTNLPPPLLGNSTGIDFQDELDEFFKNVSTSIPNFGSLTQINTTLLDLTYEMLSLQQVVKALNESYIDLKELGNYTYYNKWPWYIWLGFIAGLVALALCVFFILCCTGCGTNCMGKLKCNRCCDRYEEYDLEPHKVHVH

SEQ ID NO: 119 - RNA, 7561 nt, Artificial Sequence
  Synthetic: SAM VEE TC-83 replicon 1-7561
auaggcggcgcaugagagaagcccagaccaauuaccuacccaaaauggagaaaguucacguugacaucgaggaagacagcccauuccucagagcuuugcagcggagcuucccgcaguuugagguagaagccaagcaggucacugauaaugaccaugcuaaugccagagcguuuucgcaucuggcuucaaaacugaucgaaacggagguggacccauccgacacgauccuugacauuggaagugcgcccgcccgcagaauguauucuaagcacaaguaucauuguaucuguccgaugagaugugcggaagauccggacagauuguauaaguaugcaacuaagcugaagaaaaacuguaaggaaauaacugauaaggaauuggacaagaaaaugaaggagcucgccgccgucaugagcgacccugaccuggaaacugagacuaugugccuccacgacgacgagucgugucgcuacgaagggcaagucgcuguuuaccaggauguauacgcgguugacggaccgacaagucucuaucaccaagccaauaagggaguuagagucgccuacuggauaggcuuugacaccaccccuuuuauguuuaagaacuuggcuggagcauauccaucauacucuaccaacugggccgacgaaaccguguuaacggcucguaacauaggccuaugcagcucugacguuauggagcggucacguagagggauguccauucuuagaaagaaguauuugaaaccauccaacaauguucuauucucuguuggcucgaccaucuaccacgagaagagggacuuacugaggagcuggcaccugccgucuguauuucacuuacguggcaagcaaaauuacacaugucggugugagacuauaguuaguugcgacggguacgucguuaaaagaauagcuaucaguccaggccuguaugggaagccuucaggcuaugcugcuacgaugcaccgcgagggauucuugugcugcaaagugacagacacauugaacggggagagggucucuuuucccgugugcacguaugugccagcuacauugugugaccaaaugacuggcauacuggcaacagaugucagugcggacgacgcgcaaaaacugcugguugggcucaaccagcguauagucgucaacggucgcacccagagaaacaccaauaccaugaaaaauuaccuuuugcccguaguggcccaggcauuugcuaggugggcaaaggaauauaaggaagaucaagaagaugaaaggccacuaggacuacgagauagacaguuagucaugggguguuguugggcuuuuagaaggcacaagauaacaucuauuuauaagcgcccggauacccaaaccaucaucaaagugaacagcgauuuccacucauucgugcugcccaggauaggcaguaacacauuggagaucgggcugagaacaagaaucaggaaaauguuagaggagcacaaggagccgucaccucucauuaccgccgaggacguacaagaagcuaagugcgcagccgaugaggcuaaggaggugcgugaagccgaggaguugcgcgcagcucuaccaccuuuggcagcugauguugaggagcccacucuggaagccgaugucgacuugauguuacaagaggcuggggccggcucaguggagacaccucguggcuugauaaagguuaccagcuacgauggcgaggacaagaucggcucuuacgcugugcuuucuccgcaggcuguacucaagagugaaaaauuaucuugcauccacccucucgcugaacaagucauagugauaacacacucuggccgaaaagggcguuaugccguggaaccauaccaugguaaaguaguggugccagagggacaugcaauacccguccaggacuuucaagcucugagugaaagugccaccauuguguacaacgaacgugaguucguaaacagguaccugcaccauauugccacacauggaggagcgcugaacacugaugaagaauauuacaaaacugucaagcccagcgagcacgacggcgaauaccuguacgacaucgacaggaaacagugcgucaagaaagaacuagucacugggcuagggcucacaggcgagcugguggauccucccuuccaugaauucgccuacgagagucugagaacacgaccagccgcuccuuaccaaguaccaaccauagggguguauggcgugccaggaucaggcaagucuggcaucauuaaaagcgcagucaccaaaaaagaucuaguggugagcgccaagaaagaaaacugugcagaaauuauaagggacgucaagaaaaugaaagggcuggacgucaaugccagaacuguggacucagugcucuugaauggaugcaaacaccccguagagacccuguauauugacgaagcuuuugcuugucaugcagguacucucagagcgcucauagccauuauaagaccuaaaaaggcagugcucugcggggaucccaaacagugcgguuuuuuuaacaugaugugccugaaagugcauuuuaaccacgagauuugcacacaagucuuccacaaaagcaucucucgccguugcacuaaaucugugacuucggucgucucaaccuuguuuuacgacaaaaaaaugagaacgacgaauccgaaagagacuaagauugugauugacacuaccggcaguaccaaaccuaagcaggacgaucucauucucacuuguuucagagggugggugaagcaguugcaaauagauuacaaaggcaacgaaauaaugacggcagcugccucucaagggcugacccguaaagguguguaugccguucgguacaaggugaaugaaaauccucuguacgcacccaccucagaacaugugaacguccuacugacccgcacggaggaccgcaucguguggaaaacacuagccggcgacccauggauaaaaacacugacugccaaguacccugggaauuucacugccacgauagaggaguggcaagcagagcaugaugccaucaugaggcacaucuuggagagaccggacccuaccgacgucuuccagaauaaggcaaacguguguugggccaaggcuuuagugccggugcugaagaccgcuggcauagacaugaccacugaacaauggaacacuguggauuauuuugaaacggacaaagcucacucagcagagauaguauugaaccaacuaugcgugagguucuuuggacucgaucuggacuccggucuauuuucugcacccacuguuccguuauccauuaggaauaaucacugggauaacuccccgucgccuaacauguacgggcugaauaaagaagugguccgucagcucucucgcagguacccacaacugccucgggcaguugccacuggaagagucuaugacaugaacacugguacacugcgcaauuaugauccgcgcauaaaccuaguaccuguaaacagaagacugccucaugcuuuaguccuccaccauaaugaacacccacagagugacuuuucuucauucgucagcaaauugaagggcagaacuguccugguggucggggaaaaguuguccgucccaggcaaaaugguugacugguugucagaccggccugaggcuaccuucagagcucggcuggauuuaggcaucccaggugaugugcccaaauaugacauaauauuuguuaaugugaggaccccauauaaauaccaucacuaucagcagugugaagaccaugccauuaagcuuagcauguugaccaagaaagcuugucugcaucugaaucccggcggaaccugugucagcauagguuaugguuacgcugacagggccagcgaaagcaucauuggugcuauagcgcggcaguucaaguuuucccggguaugcaaaccgaaauccucacuugaagagacggaaguucuguuuguauucauuggguacgaucgcaaggcccguacgcacaauccuuacaagcuuucaucaaccuugaccaacauuuauacagguuccagacuccacgaagccggaugugcacccucauaucauguggugcgaggggauauugccacggccaccgaaggagugauuauaaaugcugcuaacagcaaaggacaaccuggcggaggggugugcggagcgcuguauaagaaauucccggaaagcuucgauuuacagccgaucgaaguaggaaaagcgcgacuggucaaaggugcagcuaaacauaucauucaugccguaggaccaaacuucaacaaaguuucggagguugaaggugacaaacaguuggcagaggcuuaugaguccaucgcuaagauugucaacgauaacaauuacaagucaguagcgauuccacuguuguccaccggcaucuuuuccgggaacaaagaucgacuaacccaaucauugaaccauuugcugacagcuuuagacaccacugaugcagauguagccauauacugcagggacaagaaaugggaaaugacucucaaggaagcaguggcuaggagagaagcaguggaggagauaugcauauccgacgacucuucagugacagaaccugaugcagagcuggugagggugcauccgaagaguucuuuggcuggaaggaagggcuacagcacaagcgauggcaaaacuuucucauauuuggaagggaccaaguuucaccaggcggccaaggauauagcagaaauuaaugccauguggcccguugcaacggaggccaaugagcagguaugcauguauauccucggagaaagcaugagcaguauuaggucgaaaugccccgucgaagagucggaagccuccacaccaccuagcacgcugccuugcuugugcauccaugccaugacuccagaaagaguacagcgccuaaaagccucacguccagaacaaauuacugugugcucauccuuuccauugccgaaguauagaaucacuggugugcagaagauccaaugcucccagccuauauuguucucaccgaaagugccugcguauauucauccaaggaaguaucucguggaaacaccaccgguagacgagacuccggagccaucggcagagaaccaauccacagaggggacaccugaacaaccaccacuuauaaccgaggaugagaccaggacuagaacgccugagccgaucaucaucgaagaggaagaagaggauagcauaaguuugcugucagauggcccgacccaccaggugcugcaagucgaggcagacauucacgggccgcccucuguaucuagcucauccugguccauuccucaugcauccgacuuugauguggacaguuuauccauacuugacacccuggagggagcuagcgugaccagcggggcaacgucagccgagacuaacucuuacuucgcaaagaguauggaguuucuggcgcgaccggugccugcgccucgaacaguauucaggaacccuccacaucccgcuccgcgcacaagaacaccgucacuugcacccagcagggccugcucgagaaccagccuaguuuccaccccgccaggcgugaauagggugaucacuagagaggagcucgaggcgcuuaccccgucacgcacuccuagcaggucggucucgagaaccagccuggucuccaacccgccaggcguaaauagggugauuacaagagaggaguuugaggcguucguagcacaacaacaaugacgguuugaugcgggugcauacaucuuuuccuccgacaccggucaagggcauuuacaacaaaaaucaguaaggcaaacggugcuauccgaagugguguuggagaggaccgaauuggagauuucguaugccccgcgccucgaccaagaaaaagaagaauuacuacgcaagaaauuacaguuaaaucccacaccugcuaacagaagcagauaccaguccaggaagguggagaacaugaaagccauaacagcuagacguauucugcaaggccuagggcauuauuugaaggcagaaggaaaaguggagugcuaccgaacccugcauccuguuccuuuguauucaucuagugugaaccgugccuuuucaagccccaaggucgcaguggaagccuguaacgccauguugaaagagaacuuuccgacuguggcuucuuacuguauuauuccagaguacgaugccuauuuggacaugguugacggagcuucaugcugcuuagacacugccaguuuuugcccugcaaagcugcgcagcuuuccaaagaaacacuccuauuuggaacccacaauacgaucggcagugccuucagcgauccagaacacgcuccagaacguccuggcagcugccacaaaaagaaauugcaaugucacgcaaaugagagaauugcccguauuggauucggcggccuuuaauguggaaugcuucaagaaauaugcguguaauaaugaauauugggaaacguuuaaagaaaaccccaucaggcuuacugaagaaaacgugguaaauuacauuaccaaauuaaaaggaccaaaagcugcugcucuuuuugcgaagacacauaauuugaauauguugcaggacauaccaauggacagguuuguaauggacuuaaagagagacgugaaagugacuccaggaacaaaacauacugaagaacggcccaagguacaggugauccaggcugccgauccgcuagcaacagcguaucugugcggaauccaccgagagcugguuaggagauuaaaugcgguccugcuuccgaacauucauacacuguuugauaugucggcugaagacuuugacgcuauuauagccgagcacuuccagccuggggauuguguucuggaaacugacaucgcgucguuugauaaaagugaggacgacgccauggcucugaccgcguuaaugauucuggaagacuuagguguggacgcagagcuguugacgcugauugaggcggcuuucggcgaaauuucaucaauacauuugcccacuaaaacuaaauuuaaauucggagccaugaugaaaucuggaauguuccucacacuguuugugaacacagucauuaacauuguaaucgcaagcagaguguugagagaacggcuaaccggaucaccaugugcagcauucauuggagaugacaauaucgugaaaggagucaaaucggacaaauuaauggcagacaggugcgccaccugguugaauauggaagucaagauuauagaugcuguggugggcgagaaagcgccuuauuucuguggaggguuuauuuugugugacuccgugaccggcacagcgugccguguggcagacccccuaaaaaggcuguuuaagcuuggcaaaccucuggcagcagacgaugaacaugaugaugacaggagaagggcauugcaugaagagucaacacgcuggaaccgaguggguauucuuucagagcugugcaaggcaguagaaucaagguaugaaaccguaggaacuuccaucauaguuauggccaugacuacucuagcuagcaguguuaaaucauucagcuaccugagaggggccccuauaacucucuacggcuaaccugaauggacuacgacauagucuaguccgccaag

SEQ ID NO: 120 - RNA, 186 nt, Artificial Sequence
  Synthetic: SAM VEE TC-83 replicon 7562-7747
ucuagacggcgcgcccacccagcggccgcauacagcagcaauuggcaagcugcuuacauagaacucgcggcgauuggcaugccgccuuaaaauuuuuauuuuauuuuucuuuucuuuuccgaaucggauuuuguuuuuaauauuucaaaaaaaaaaaaaaaaaaaaaaaaaaaaaaaaaaaaaaaa

SEQ ID NO: 121 - protein, 10 aa, Artificial Sequence
  Synthetic: Glycine/Serine/Alanine linker
GGGGSGGGGS

SEQ ID NO: 122 - protein, 13 aa, Artificial Sequence
  Synthetic: PADRE linker
AKFVAAWTLKAAA

SEQ ID NO: 123 - protein, 15 aa, Artificial Sequence
  Synthetic: D linker
QSIALSSLMVAQAIP

SEQ ID NO: 124 - protein, 32 aa, Artificial Sequence
  Synthetic: TpD linker
ILMQYIKANSKFIGIPMGLPQSIALSSLMVAQ

SEQ ID NO: 125 - protein, 1134 aa, Artificial Sequence
  Synthetic: B.1.351_PROSS_0_5
QCVNFTTRTQLPPAYTNSFTRGVYYPDKVFRSSVLHSTQDLFLPFFSNVTWFHAIHVSGTNGTKRFDNPVLPFNDGVYFASTEKSNIIRGWIFGTTLDSKTQSLLIVNNATNVVIKVCEFQFCNDPFLGVYYHKNNKSWMESEFRVYSSANNCTFEYVSQPFLMDLEGKQGNFKNLREFVFKNIDGYFKIYSKHTPINLVRGLPQGFSALEPLVDLPIGINITRFQTLLALHISYLTPGDSSSGWTAGAAAYYVGYLQPRTFLLKYNENGTITDAVDCALDPLSETKCTLKSFTVEKGIYQTSNFRVQPTESIVRFPNITNLCPFGEVFNATRFASVYAWNRKRISNCVADYSVLYNSASFSTFKCYGVSPTKLNDLCFTNVYADSFVIRGDEVRQIAPGQTGNIADYNYKLPDDFTGCVIAWNSNNLDSKVGGNYNYLYRLFRKSNLKPFERDISTEIYQAGSTPCNGVKGFNCYFPLQSYGFQPTYGVGYQPYRVVVLSFELLHAPATVCGPKKSTNLVKNKCVNFNFNGLTGTGVLTESNKKFLPFQQFGRDIADTTDAVRDPQTLEILDITPCSFGGVSVITPGTNTSNQVAVLYQGVNCTEVPVAIHADQLTPTWRVYSTGSNVFQTRAGCLIGAEHVNNSYECDIPIGAGICASYQTQTNSPGSASSVANQSIIAYTMSLGVENPIPYSNNVIAIPTNFTISVTTEVIPVSMTKTSVDCAQYICGDNEECEQLLLQYGSFCDQLNRALHEIAVKQDEALLEVFAQVKQIYKTPEIKDFGGFNFSQILPDPSKSSYRSAIEDLLFNKVKLSDPGFIKQYQDCLGDNSARDLICAQFFNGLTVLPPLLTDEMIAAYTSALLAGTITAGWTFGAGSALAIPFALQMAYRFNGIGVTQNVLYENQKLIANQFNKAITKIQESLTTTSQALAKLQDVVNQNAQALNTLVKQLSNKFGAISSVLNDILSRLDPPEAKVQIDRLITGRLQALQTYVTQQLIRAAEIKASAQLAATKMSECVLGQSTRVNFCGKGYHLMSFPQSAPHGVVFLHVTYVPSQFKNFTTAPAICHDGRAYFPREGVFVSNGTEWFVTQRNFYEPQPITTDNTFVSGNCDVVIGIVNNTVYDPLQPDLDS

SEQ ID NO: 126 - protein, 1134 aa, Artificial Sequence
  Synthetic: B.1.351_PROSS_1_5
QCVNFTTRTQLPPAYTNSFTRGVYYPDKVFRSSVLHSTQDLFLPFFSNVTWFHAIHVSGTNGTKRFDNPVLPFNDGVYFASTEKSNIIRGWIFGTTLDSKTQSLLIVNNATNVVIKVCEFQFCNDPFLGVYYHKNNKSWMESEFRVYSSANNCTFEYVSQPFLMDLEGKQGNFKNLREFVFKNIDGYFKIYSKHTPINLVRGLPQGFSALEPLVDLPIGINITRFQTLLALHISYLTPGDSSSGWTAGAAAYYVGYLQPRTFLLKYNENGTITDAVDCALDPLSETKCTLKSFTVEKGIYQTSNFRVQPTESIVRFPNITNLCPFGEVFNATRFASVYAWNRKRISNCVADYSVLYNSASFSTFKCYGVSPTKLNDLCFTNVYADSFVIRGDEVRQIAPGQTGNIADYNYKLPDDFTGCVIAWNSNNLDSKVGGNYNYLYRLFRKSNLKPFERDISTEIYQAGSTPCNGVKGFNCYFPLQSYGFQPTYGVGYQPYRVVVLSFELLHAPATVCGPKKSTNLVKNKCVNFNFNGLTGTGVLTESNKKFLPFQQFGRDIADTTDAVRDPQTLEILDITPCSFGGVSVITPGTNTSNQVAVLYQGVNCTEVPVAIHADQLTPTWRVYSTGSNVFQTRAGCLIGAEHVNNSYECDIPIGAGICASYQTQTNSPGSASSVANQSIIAYTMSLGVENPIPYSNNVIAIPTNFTISVTTEIIPVSMTKTSVDCAQYICGDNSECENLLLQYGSFCDQLNRALHEIAVKQDEALLEVFAQVKQIYKTPPIKDFGGFNFSQILPDPSKPSYRSAIEDLLFNKVKLSDPGFIKQYEDCLGDNSARDLICAQFFNGLTVLPPLLTDEMIAAYTSALLAGTITAGWTFGAGSALAIPFALQMAYRFNGIGVTQNVLYENQKLIANQFNKAITKIQESLTSTNQALAKLQDVVNQNAQALNTLVKQLSNNFGAISSVLNDILSRLDPPEAKVQIDRLITGRLQALQTYVTQQLIRAAEIKASAELAATKMSECVLGQSKRVNFCGKGYHLMSFPQSAPHGVVFLHVTYVPSQYKNFTTAPAICHDGRAHFPREGVFVSNGTDWYVTQRNFYEPQPITTDNTFVSGNCDVVIGIVNNTVYDPLQPDLDS

SEQ ID NO: 127 - protein, 1134 aa, Artificial Sequence
  Synthetic: B.1.351_PROSS_3_5
QCVNFTTRTQLPPAYTNSFTRGVYYPDKVFRSSVLHSTQDLFLPFFSNVTWFHAIHVSGTNGTKRFDNPVLPFNDGVYFASTEKSNIIRGWIFGTTLDSKTQSLLIVNNATNVVIKVCEFQFCNDPFLGVYYHKNNKSWMESEFRVYSSANNCTFEYVSQPFLMDLEGKQGNFKNLREFVFKNIDGYFKIYSKHTPINLVRGLPQGFSALEPLVDLPIGINITRFQTLLALHISYLTPGDSSSGWTAGAAAYYVGYLQPRTFLLKYNENGTITDAVDCALDPLSETKCTLKSFTVEKGIYQTSNFRVQPTESIVRFPNITNLCPFGEVFNATRFASVYAWNRKRISNCVADYSVLYNSASFSTFKCYGVSPTKLNDLCFTNVYADSFVIRGDEVRQIAPGQTGNIADYNYKLPDDFTGCVIAWNSNNLDSKVGGNYNYLYRLFRKSNLKPFERDISTEIYQAGSTPCNGVKGFNCYFPLQSYGFQPTYGVGYQPYRVVVLSFELLHAPATVCGPKKSTNLVKNKCVNFNFNGLTGTGVLTESNKKFLPFQQFGRDIADTTDAVRDPQTLEILDITPCSFGGVSVITPGTNTSNQVAVLYQGVNCTEVPVAIHADQLTPTWRVYSTGSNVFQTRAGCLIGAEHVNNSYECDIPIGAGICASYQTQTNSPGSASSVASQSIIAYTMSLGVENPIPYSNNVIAIPTNFTISVTTEIIPVSMTKTSVDCAQYICGDSTECENLLLQYGSFCDQLNRALHEIAVKQDENTQEVFAQVKQIYKTPPIKDFGGFNFSQILPDPSKPSYRSVIEDLLFNKVTLSDPGFIKQYQDCLGDPSARDLICAQKFNGLTVLPPLLTDEMIAAYTSALLAGTITAGWTFGAGSALAIPFAMQMAYRFNGIGVTQNVLYENQKLIANQFNKAIGKIQDSLSSTSSALAKLQDVVNQNAQALNTLVKQLSNNFGAISSVLNDILSRLDPPEAKVQIDRLITGRLQALQTYVTQQLIRAAEIKASAELAATKMSECVLGQSKRVNFCGKGYHLMSFPQSAPHGVVFLHVTYVPAQYKNFTTAPAICHDGRAHFPREGVFVSNGTHWFVTQRNFYEPQPITTDNTFVSGNCDVVIGIVNNTVYDPLQPELDS

SEQ ID NO: 128 - protein, 1134 aa, Artificial Sequence
  Synthetic: B.1.351_PROSS_4_0
QCVNFTTRTQLPPAYTNSFTRGVYYPDKVFRSSVLHSTQDLFLPFFSNVTWFHAIHVSGTNGTKRFDNPVLPFNDGVYFASTEKSNIIRGWIFGTTLDSKTQSLLIVNNATNVVIKVCEFQFCNDPFLGVYYHKNNKSWMESEFRVYSSANNCTFEYVSQPFLMDLEGKQGNFKNLREFVFKNIDGYFKIYSKHTPINLVRGLPQGFSALEPLVDLPIGINITRFQTLLALHISYLTPGDSSSGWTAGAAAYYVGYLQPRTFLLKYNENGTITDAVDCALDPLSETKCTLKSFTVEKGIYQTSNFRVQPTESIVRFPNITNLCPFGEVFNATRFASVYAWNRKRISNCVADYSVLYNSASFSTFKCYGVSPTKLNDLCFTNVYADSFVIRGDEVRQIAPGQTGNIADYNYKLPDDFTGCVIAWNSNNLDSKVGGNYNYLYRLFRKSNLKPFERDISTEIYQAGSTPCNGVKGFNCYFPLQSYGFQPTYGVGYQPYRVVVLSFELLHAPATVCGPKKSTNLVKNKCVNFNFNGLTGTGVLTESNKKFLPFQQFGRDIADTTDAVRDPQTLEILDITPCSFGGVSVITPGTNTSNQVAVLYQGVNCTEVPVAIHADQLTPTWRVYSTGSNVFQTRAGCLIGAEHVNNSYECDIPIGAGICASYQTQTNSPGSASSVAQQSIIAYTMSLGVENPIPYSNNVIAIPTNFTISVTTEIIPVSMTKTSVDCAQYICGDSTECENLLLQYGSFCTQLNRALHEIAVEQDKNTQEVFAQVKQIYKTPPIKDFGGFNFSQILPDPSKPSYRSVIEDLLFNKVTLSDPGFIKQYQDCLGDPAARDLICAQKFNGLTVLPPLLTDEMIAAYTSALLAGTITAGWTFGAGSALAIPFAMQMAYRFNGIGVTQNVLYENQKLIANQFNKAIGKIQDSLSSTSSALAKLQDVVNQNAQALNTLVKQLSNNFGAISSVLNDILSRLDPPEAKVQIDRLITGRLQALQTYVTQQLIRAAEIKASAELAATKMSECVLGQSKRVNFCGKGYHLMSFPQSAPHGVVFLHVTYVPAQYKNFTTAPAICHDGRAHFPREGVFVSNGTHWFVTQRNFYEPQPITTDNTFVSGNCDVVIGIVNNTVYDPLQPELDS

SEQ ID NO: 129 - protein, 1134 aa, Artificial Sequence
  Synthetic: B.1.351_PROSS_5_5
QCVNFTTRTQLPPAYTNSFTRGVYYPDKVFRSSVLHSTQDLFLPFFSNVTWFHAIHVSGTNGTKRFDNPVLPFNDGVYFASTEKSNIIRGWIFGTTLDSKTQSLLIVNNATNVVIKVCEFQFCNDPFLGVYYHKNNKSWMESEFRVYSSANNCTFEYVSQPFLMDLEGKQGNFKNLREFVFKNIDGYFKIYSKHTPINLVRGLPQGFSALEPLVDLPIGINITRFQTLLALHISYLTPGDSSSGWTAGAAAYYVGYLQPRTFLLKYNENGTITDAVDCALDPLSETKCTLKSFTVEKGIYQTSNFRVQPTESIVRFPNITNLCPFGEVFNATRFASVYAWNRKRISNCVADYSVLYNSASFSTFKCYGVSPTKLNDLCFTNVYADSFVIRGDEVRQIAPGQTGNIADYNYKLPDDFTGCVIAWNSNNLDSKVGGNYNYLYRLFRKSNLKPFERDISTEIYQAGSTPCNGVKGFNCYFPLQSYGFQPTYGVGYQPYRVVVLSFELLHAPATVCGPKKSTNLVKNKCVNFNFNGLTGTGVLTESNKKFLPFQQFGRDIADTTDAVRDPQTLEILDITPCSFGGVSVITPGTNTSNQVAVLYQGVNCTEVPVAIHADQLTPTWRVYSTGSNVFQTRAGCLIGAEHVNNSYECDIPIGAGICASYQTQTNSPGSASSVASQSIIAYTMSLGVENPIPYSNNVIAIPTNFTISVTTEIIPVSMTKTSVDCAQYICGDSTECENLLLQYGSFCTQLNRALTEIAVEQDKNTQEVFAQVKQIYKTPPIKDFGGFNFSQILPDPSKPSYRSFIEDLLFNKVTLADPGFIKQYQDCLGDPAARDLICAQKFNGLTVLPPLLTDEMIAAYTSALLAGTITSGWTFGAGSALAIPFAMQMAYRFNGIGVTQNVLYENQKLIANQFNKAIGKIQDSLSSTSSALGKLQDVVNQNAQALNTLVKQLSSNFGAISSVLNDILSRLDPPEAEVQIDRLITGRLQALQTYVTQQLIRAAEIKASANLAATKMSECVLGQSKRVDFCGKGYHLMSFPQSAPHGVVFLHVTYVPAQYKNFTTAPAICHDGKAHFPREGVFVSNGTHWFVTQRNFYEPQPITTDNTFVSGNCDVVIGIVNNTVYDPLQPELDS

SEQ ID NO: 130 - protein, 1134 aa, Artificial Sequence
  Synthetic: B.1.351_Buried_PROSS_1_0
QCVNFTTRTQLPPAYTNSFTRGVYYPDKVFRSSVLHSTQDLFLPFFSNVTWFHAIHVSGTNGTKRFDNPVLPFNDGVYFASTEKSNIIRGWIFGTTLDSKTQSLLIVNNATNVVIKVCEFQFCNDPFLGVYYHKNNKSWMESEFRVYSSANNCTFEYVSQPFLMDLEGKQGNFKNLREFVFKNIDGYFKIYSKHTPINLVRGLPQGFSALEPLVDLPIGINITRFQTLLALHISYLTPGDSSSGWTAGAAAYYVGYLQPRTFLLKYNENGTITDAVDCALDPLSETKCTLKSFTVEKGIYQTSNFRVQPTESIVRFPNITNLCPFGEVFNATRFASVYAWNRKRISNCVADYSVLYNSASFSTFKCYGVSPTKLNDLCFTNVYADSFVIRGDEVRQIAPGQTGNIADYNYKLPDDFTGCVIAWNSNNLDSKVGGNYNYLYRLFRKSNLKPFERDISTEIYQAGSTPCNGVKGFNCYFPLQSYGFQPTYGVGYQPYRVVVLSFELLHAPATVCGPKKSTNLVKNKCVNFNFNGLTGTGVLTESNKKFLPFQQFGRDIADTTDAVRDPQTLEILDITPCSFGGVSVITPGTNTSNQVAVLYQGVNCTEVPVAIHADQLTPTWRVYSTGSNVFQTRAGCLIGAEHVNNSYECDIPIGAGICASYQTQTNSPGSASSVASQSIIAYTMSLGVENSIAYSNNVISIPTNFTISVTTEIIPVSMTKTSVDCAQYICGDNTECENLLLQYGSFCDQLNRALHGIAVEQDKNLQEVFAQVKQIYKTPPIKDFGGFNFSQILPDPSKPSKRSFIEDLLFNKVTLADAGFIKQYGDCLGDNAARDLICAQSFNGLTVLPPLLTDEMIAAYTSALLAGTITAGWTFGAGAALAIPFALQMAYRFNGIGVTQNVLYENQKLIANQFNSAITKIQDSLSSTASALAKLQDVVNQNAQALNTLVKQLSNKFGAISSVLNDILSRLDPPEAEVQIDRLITGRLQALQTYVTQQLIRAAEIKASANLAATKMSECVLGQSKRVNFCGKGYHLMSFPQSAPHGVVFLHVTYVPAQEKNFTTAPAICHDGKAYFPREGVFVSNGTHWFVTQRNFYEPQIITTDNTFVSGNCDVVIGIVNNTVYDPLQPELDS

SEQ ID NO: 131 - protein, 1134 aa, Artificial Sequence
  Synthetic: B.1.351_Buried_PROSS_1_5
QCVNFTTRTQLPPAYTNSFTRGVYYPDKVFRSSVLHSTQDLFLPFFSNVTWFHAIHVSGTNGTKRFDNPVLPFNDGVYFASTEKSNIIRGWIFGTTLDSKTQSLLIVNNATNVVIKVCEFQFCNDPFLGVYYHKNNKSWMESEFRVYSSANNCTFEYVSQPFLMDLEGKQGNFKNLREFVFKNIDGYFKIYSKHTPINLVRGLPQGFSALEPLVDLPIGINITRFQTLLALHISYLTPGDSSSGWTAGAAAYYVGYLQPRTFLLKYNENGTITDAVDCALDPLSETKCTLKSFTVEKGIYQTSNFRVQPTESIVRFPNITNLCPFGEVFNATRFASVYAWNRKRISNCVADYSVLYNSASFSTFKCYGVSPTKLNDLCFTNVYADSFVIRGDEVRQIAPGQTGNIADYNYKLPDDFTGCVIAWNSNNLDSKVGGNYNYLYRLFRKSNLKPFERDISTEIYQAGSTPCNGVKGFNCYFPLQSYGFQPTYGVGYQPYRVVVLSFELLHAPATVCGPKKSTNLVKNKCVNFNFNGLTGTGVLTESNKKFLPFQQFGRDIADTTDAVRDPQTLEILDITPCSFGGVSVITPGTNTSNQVAVLYQGVNCTEVPVAIHADQLTPTWRVYSTGSNVFQTRAGCLIGAEHVNNSYECDIPIGAGICASYQTQTNSPGSASSVASQSIIAYTMSLGVENSIAYSNNVIAIPTNFTISVTTEIIPVSMTKTSVDCAQYICGDNTECENLLLQYGSFCDQLNRALHGIAVEQDKALQEVFAQVKQIYKTPPIKDFGGFNFSQILPDPSKPSKRSFIEDLLFNKVTLADAGFIKQYGDCLGDNAARDLICAQKFNGLTVLPPLLTDEMIAAYTSALLAGTITAGWTFGAGAALAIPFALQMAYRFNGIGVTQNVLYENQKLIANQFNSAITKIQDSLSSTASALAKLQDVVNQNAQALNTLVKQLSNNFGAISSVLNDILSRLDPPEAEVQIDRLITGRLQALQTYVTQQLIRAAEIKASANLAATKMSECVLGQSKRVNFCGKGYHLMSFPQSAPHGVVFLHVTYVPAQEKNFTTAPAICHDGKAHFPREGVFVSNGTHWYVTQRNFYEPQIITTDNTFVSGNCDVVIGIVNNTVYDPLQPELDS

SEQ ID NO: 132 - protein, 1134 aa, Artificial Sequence
  Synthetic: B.1.351_Buried_PROSS_3_0
QCVNFTTRTQLPPAYTNSFTRGVYYPDKVFRSSVLHSTQDLFLPFFSNVTWFHAIHVSGTNGTKRFDNPVLPFNDGVYFASTEKSNIIRGWIFGTTLDSKTQSLLIVNNATNVVIKVCEFQFCNDPFLGVYYHKNNKSWMESEFRVYSSANNCTFEYVSQPFLMDLEGKQGNFKNLREFVFKNIDGYFKIYSKHTPINLVRGLPQGFSALEPLVDLPIGINITRFQTLLALHISYLTPGDSSSGWTAGAAAYYVGYLQPRTFLLKYNENGTITDAVDCALDPLSETKCTLKSFTVEKGIYQTSNFRVQPTESIVRFPNITNLCPFGEVFNATRFASVYAWNRKRISNCVADYSVLYNSASFSTFKCYGVSPTKLNDLCFTNVYADSFVIRGDEVRQIAPGQTGNIADYNYKLPDDFTGCVIAWNSNNLDSKVGGNYNYLYRLFRKSNLKPFERDISTEIYQAGSTPCNGVKGFNCYFPLQSYGFQPTYGVGYQPYRVVVLSFELLHAPATVCGPKKSTNLVKNKCVNFNFNGLTGTGVLTESNKKFLPFQQFGRDIADTTDAVRDPQTLEILDITPCSFGGVSVITPGTNTSNQVAVLYQGVNCTEVPVAIHADQLTPTWRVYSTGSNVFQTRAGCLIGAEHVNNSYECDIPIGAGICASYQTQTNSPGSASSVASQSIIAYTMSLGVENSIAYSNNVIAIPTNFTISVTTEIIPVSMTKTSVDCTQYICGDSTECENLLLQYGSFCDQLNRALHGIAVEQDKNTQEVFAQVKQIYKTPPIKDFGGFNFSQILPDPSKPSKRSFIEDLLFNKVTLADAGFIKQYGDCLGDPAARDLICAQKFNGLTVLPPLLTDEMIAAYTSALLAGTITAGWTFGAGAALAIPFAMQMAYRFNGIGVTQNVLYENQKLIANQFNSAIGKIQDSLSSTASALAKLQDVVNQNAQALNTLVKQLSNNFGAISSVLNDILSRLDPPEAEVQIDRLITGRLQALQTYVTQQLIRAAEIKASANLAATKMSECVLGQSKRVNFCGKGYHLMSFPQSAPHGVVFLHVTYVPAQEKNFTTAPAICHDGKAHFPREGVFVSNGTHWFVTQRNFYEPQIITTDNTFVSGNCDVVIGIVNNTVYDPLQPELDS

SEQ ID NO: 133 - protein, 1134 aa, Artificial Sequence
  Synthetic: B.1.351_Buried_PROSS_5_0
QCVNFTTRTQLPPAYTNSFTRGVYYPDKVFRSSVLHSTQDLFLPFFSNVTWFHAIHVSGTNGTKRFDNPVLPFNDGVYFASTEKSNIIRGWIFGTTLDSKTQSLLIVNNATNVVIKVCEFQFCNDPFLGVYYHKNNKSWMESEFRVYSSANNCTFEYVSQPFLMDLEGKQGNFKNLREFVFKNIDGYFKIYSKHTPINLVRGLPQGFSALEPLVDLPIGINITRFQTLLALHISYLTPGDSSSGWTAGAAAYYVGYLQPRTFLLKYNENGTITDAVDCALDPLSETKCTLKSFTVEKGIYQTSNFRVQPTESIVRFPNITNLCPFGEVFNATRFASVYAWNRKRISNCVADYSVLYNSASFSTFKCYGVSPTKLNDLCFTNVYADSFVIRGDEVRQIAPGQTGNIADYNYKLPDDFTGCVIAWNSNNLDSKVGGNYNYLYRLFRKSNLKPFERDISTEIYQAGSTPCNGVKGFNCYFPLQSYGFQPTYGVGYQPYRVVVLSFELLHAPATVCGPKKSTNLVKNKCVNFNFNGLTGTGVLTESNKKFLPFQQFGRDIADTTDAVRDPQTLEILDITPCSFGGVSVITPGTNTSNQVAVLYQGVNCTEVPVAIHADQLTPTWRVYSTGSNVFQTRAGCLIGAEHVNNSYECDIPIGAGICASYQTQTNSPGSASSVASQSIIAYTMSLGVENSIAYSNNVIAIPTNFTISVTTEIIPVSMTKTSVDCAQYICGDSTECENLLLQYGSFCTQLNRALHGIAVEQDKNIQEVFAQVKQIYKTPPIKDFGGFNFSQILPDPSKPSKRSFIEDLLFNKVTLADAGFIKQYGDCLGDPAARDLICAQKFNGLTVLPPLLTDEMIAAYTSALLAGTITAGWTFGAGAALAIPFAMQMAYRFNGIGVTQNVLYENQKLIANQFNSAIGKIQDSLSSTASALAKLQDVVNQNAQALNTLVKQLSSNFGAISSVLNDILSRLDPPEAEVQIDRLITGRLQALQTYVTQQLIRAAEIKASANLAATKMSECVLGQSKRVDFCGKGYHLMSFPQSAPHGVVFLHVTYVPAQEKNFTTAPAICHDGKAHFPREGVFVSNGTHWFVTQRNFYEPQIITTDNTFVSGNCDVVIGIVNNTVYDPLQPELDS

SEQ ID NO: 134 - protein, 1134 aa, Artificial Sequence
  Synthetic: B.1.351_Buried_PROSS_6_0
QCVNFTTRTQLPPAYTNSFTRGVYYPDKVFRSSVLHSTQDLFLPFFSNVTWFHAIHVSGTNGTKRFDNPVLPFNDGVYFASTEKSNIIRGWIFGTTLDSKTQSLLIVNNATNVVIKVCEFQFCNDPFLGVYYHKNNKSWMESEFRVYSSANNCTFEYVSQPFLMDLEGKQGNFKNLREFVFKNIDGYFKIYSKHTPINLVRGLPQGFSALEPLVDLPIGINITRFQTLLALHISYLTPGDSSSGWTAGAAAYYVGYLQPRTFLLKYNENGTITDAVDCALDPLSETKCTLKSFTVEKGIYQTSNFRVQPTESIVRFPNITNLCPFGEVFNATRFASVYAWNRKRISNCVADYSVLYNSASFSTFKCYGVSPTKLNDLCFTNVYADSFVIRGDEVRQIAPGQTGNIADYNYKLPDDFTGCVIAWNSNNLDSKVGGNYNYLYRLFRKSNLKPFERDISTEIYQAGSTPCNGVKGFNCYFPLQSYGFQPTYGVGYQPYRVVVLSFELLHAPATVCGPKKSTNLVKNKCVNFNFNGLTGTGVLTESNKKFLPFQQFGRDIADTTDAVRDPQTLEILDITPCSFGGVSVITPGTNTSNQVAVLYQGVNCTEVPVAIHADQLTPTWRVYSTGSNVFQTRAGCLIGAEHVNNSYECDIPIGAGICASYQTQTNSPGSASSVASQSIIAYTMSLGVENSIAYSNNVIAIPTNFTISVTTEIIPVSMTKTSVDCAQYICGDSTECENLLLQYGSFCTQLNRALTGIAVEQDKNTQEVFAQVKQIYKTPPIKDFGGFNFSQILPDPSKPSKRSFIEDLLFNKVTLADAGFIKQYGDCLGDPAARDLICAQKFNGLTVLPPLLTDEMIAAYTSALLAGTITSGWTFGAGAALAIPFAMQMAYRFNGIGVTQNVLYENQKLIANQFNSAIGKIQDSLSSTASALGKLQDVVNQNAQALNTLVKQLSSNFGAISSVLNDILSRLDPPEAEVQIDRLITGRLQALQTYVTQQLIRAAEIKASANLAATKMSECVLGQSKRVDFCGKGYHLMSFPQSAPHGVVFLHVTYVPAQEKNFTTAPAICHDGKAHFPREGVFVSNGTHWFVTQRNFYEPQIITTDNTFVSGNCDVVIGIVNNTVYDPLQPELDS

1-29. (canceled)

30. A betacoronavirus Spike (S) protein, or fragment thereof, comprising an amino acid sequence that has amino acid substitutions, wherein said amino acid substitutions are selected from (A), (B), (C), (D-A), (D-B), (D-C), (D-D), (D-E), (D-F), (E), and (F), wherein:
(A) is:
(a) the substitute amino acids listed throughout rows 3-134 of column #4 in Table 1, wherein each substitute amino acid is located at the position that corresponds to the residue number of SEQ ID NO: 3 that is listed in the same row of column #1 in Table 1;
(b) the substitute amino acids listed throughout rows 3-134 of column #5 in Table 1, wherein each substitute amino acid is located at the position that corresponds to the residue number of SEQ ID NO: 3 that is listed in the same row of column #1 in Table 1;
(c) the substitute amino acids listed throughout rows 3-134 of column #6 in Table 1, wherein each substitute amino acid is located at the position that corresponds to the residue number of SEQ ID NO: 3 that is listed in the same row of column #1 in Table 1;
(d) the substitute amino acids listed throughout rows 3-134 of column #7 in Table 1, wherein each substitute amino acid is located at the position that corresponds to the residue number of SEQ ID NO: 3 that is listed in the same row of column #1 in Table 1;
(e) the substitute amino acids listed throughout rows 3-134 of column #8 in Table 1, wherein each substitute amino acid is located at the position that corresponds to the residue number of SEQ ID NO: 3 that is listed in the same row of column #1 in Table 1;
(f) the substitute amino acids listed throughout rows 3-134 of column #9 in Table 1, wherein each substitute amino acid is located at the position that corresponds to the residue number of SEQ ID NO: 3 that is listed in the same row of column #1 in Table 1;
(g) the substitute amino acids listed throughout rows 3-134 of column #10 in Table 1, wherein each substitute amino acid is located at the position that corresponds to the residue number of SEQ ID NO: 3 that is listed in the same row of column #1 in Table 1;
(h) the substitute amino acids listed throughout rows 3-134 of column #11 in Table 1, wherein each substitute amino acid is located at the position that corresponds to the residue number of SEQ ID NO: 3 that is listed in the same row of column #1 in Table 1;
(i) the substitute amino acids listed throughout rows 3-134 of column #12 in Table 1, wherein each substitute amino acid is located at the position that corresponds to the residue number of SEQ ID NO: 3 that is listed in the same row of column #1 in Table 1; or
(j) the substitute amino acids listed throughout rows 3-134 of column #13 in Table 1, wherein each substitute amino acid is located at the position that corresponds to the residue number of SEQ ID NO: 3 that is listed in the same row of column #1 in Table 1;
(B) is:
(k) the substitute amino acids listed throughout rows 3-145 of column #4 in Table 2, wherein each substitute amino acid is located at the position that corresponds to the residue number of SEQ ID NO: 3 that is listed in the same row of column #1 in Table 2;
(l) the substitute amino acids listed throughout rows 3-145 of column #5 in Table 2, wherein each substitute amino acid is located at the position that corresponds to the residue number of SEQ ID NO: 3 that is listed in the same row of column #1 in Table 2;
(m) the substitute amino acids listed throughout rows 3-145 of column #6 in Table 2, wherein each substitute amino acid is located at the position that corresponds to the residue number of SEQ ID NO: 3 that is listed in the same row of column #1 in Table 2;
(n) the substitute amino acids listed throughout rows 3-145 of column #7 in Table 2, wherein each substitute amino acid is located at the position that corresponds to the residue number of SEQ ID NO: 3 that is listed in the same row of column #1 in Table 2;
(o) the substitute amino acids listed throughout rows 3-145 of column #8 in Table 2, wherein each substitute amino acid is located at the position that corresponds to the residue number of SEQ ID NO: 3 that is listed in the same row of column #1 in Table 2;
(p) the substitute amino acids listed throughout rows 3-145 of column #9 in Table 2, wherein each substitute amino acid is located at the position that corresponds to the residue number of SEQ ID NO: 3 that is listed in the same row of column #1 in Table 2;
(q) the substitute amino acids listed throughout rows 3-145 of column #10 in Table 2, wherein each substitute amino acid is located at the position that corresponds to the residue number of SEQ ID NO: 3 that is listed in the same row of column #1 in Table 2;
(r) the substitute amino acids listed throughout rows 3-145 of column #11 in Table 2, wherein each substitute amino acid is located at the position that corresponds to the residue number of SEQ ID NO: 3 that is listed in the same row of column #1 in Table 2;
(s) the substitute amino acids listed throughout rows 3-145 of column #12 in Table 2, wherein each substitute amino acid is located at the position that corresponds to the residue number of SEQ ID NO: 3 that is listed in the same row of column #1 in Table 2;
(t) the substitute amino acids listed throughout rows 3-145 of column #13 in Table 2, wherein each substitute amino acid is located at the position that corresponds to the residue number of SEQ ID NO: 3 that is listed in the same row of column #1 in Table 2;
(u) the substitute amino acids listed throughout rows 3-145 of column #14 in Table 2, wherein each substitute amino acid is located at the position that corresponds to the residue number of SEQ ID NO: 3 that is listed in the same row of column #1 in Table 2;
(v) the substitute amino acids listed throughout rows 3-145 of column #15 in Table 2, wherein each substitute amino acid is located at the position that corresponds to the residue number of SEQ ID NO: 3 that is listed in the same row of column #1 in Table 2;
(w) the substitute amino acids listed throughout rows 3-145 of column #16 in Table 2, wherein each substitute amino acid is located at the position that corresponds to the residue number of SEQ ID NO: 3 that is listed in the same row of column #1 in Table 2;
(x) the substitute amino acids listed throughout rows 3-145 of column #17 in Table 2, wherein each substitute amino acid is located at the position that corresponds to the residue number of SEQ ID NO: 3 that is listed in the same row of column #1 in Table 2; or
(y) the substitute amino acids listed throughout rows 3-145 of column #18 in Table 2, wherein each substitute amino acid is located at the position that corresponds to the residue number of SEQ ID NO: 3 that is listed in the same row of column #1 in Table 2;
(C) is:
(I) the substitute amino acids listed throughout rows 3-34 of column #4 in Table 3, wherein each substitute amino acid is located at the position that corresponds to the residue number of SEQ ID NO: 3 that is listed in the same row of column #1 in Table 3;
(II) the substitute amino acids listed throughout rows 3-34 of column #5 in Table 3, wherein each substitute amino acid is located at the position that corresponds to the residue number of SEQ ID NO: 3 that is listed in the same row of column #1 in Table 3;
(III) the substitute amino acids listed throughout rows 3-34 of column #6 in Table 3, wherein each substitute amino acid is located at the position that corresponds to the residue number of SEQ ID NO: 3 that is listed in the same row of column #1 in Table 3;
(IV) the substitute amino acids listed throughout rows 3-34 of column #7 in Table 3, wherein each substitute amino acid is located at the position that corresponds to the residue number of SEQ ID NO: 3 that is listed in the same row of column #1 in Table 3; or
(V) the substitute amino acids listed throughout rows 3-34 of column #8 in Table 3, wherein each substitute amino acid is located at the position that corresponds to the residue number of SEQ ID NO: 3 that is listed in the same row of column #1 in Table 3;
(D-A) is:
Glycine (G) at the position that corresponds to residue 588 of the sequence SEQ ID NO: 3,
G at the position that corresponds to residue 656 of the sequence SEQ ID NO: 3,
Serine (S) at the position that corresponds to residue 657 of the sequence SEQ ID NO: 3,
S at the position that corresponds to residue 659 of the sequence SEQ ID NO: 3,
Proline (P) at the position that corresponds to residue 960 of the sequence SEQ ID NO: 3,
P at the position that corresponds to residue 961 of the sequence SEQ ID NO: 3, and
one of (i)-(x):
(i) Cysteines at the positions that correspond to residues 744 and 989 of the sequence SEQ ID NO: 3,
(ii) Cysteines at the positions that correspond to residues 813 and 836 of the sequence SEQ ID NO: 3,
(iii) Cysteines at the positions that correspond to residues 544 and 941 of the sequence SEQ ID NO: 3,
(iv) Cysteines at the positions that correspond to residues 824 and 560 of the sequence SEQ ID NO: 3,
(v) Cysteines at the positions that correspond to residues 387 and 961 of the sequence SEQ ID NO: 3,
(vi) Cysteines at the positions that correspond to residues 357 and 959 of the sequence SEQ ID NO: 3,
(vii) Cysteines at the positions that correspond to residues 356 and 957 of the sequence SEQ ID NO: 3,
(viii) Cysteines at the positions that correspond to residues 15 and 494 of the sequence SEQ ID NO: 3,
(ix) Cysteines at the positions that correspond to residues 496 and 518 of the sequence SEQ ID NO: 3,
(x) Cysteines at the positions that correspond to residues 495 and 538 of the sequence SEQ ID NO: 3;
(D-B) is the substitute amino acids listed throughout rows 3-134 of column #4 in Table 1, wherein each substitute amino acid is located at the position that corresponds to the residue number of SEQ ID NO: 3 that is listed in the same row of column #1 in Table 1, and one of (i)-(iv):
(i) Cysteines at the positions that correspond to residues 744 and 989 of the sequence SEQ ID NO: 3,
(ii) Cysteines at the positions that correspond to residues 813 and 836 of the sequence SEQ ID NO: 3,
(iii) Cysteines at the positions that correspond to residues 544 and 941 of the sequence SEQ ID NO: 3,
(iv) Cysteines at the positions that correspond to residues 824 and 560 of the sequence SEQ ID NO: 3;
(D-C) is the substitute amino acids listed throughout rows 3-134 of column #9 in Table 1, wherein each substitute amino acid is located at the position that corresponds to the residue number of SEQ ID NO: 3 that is listed in the same row of column #1 in Table 1, and one of (i)-(iv):
(i) Cysteines at the positions that correspond to residues 744 and 989 of the sequence SEQ ID NO: 3,
(ii) Cysteines at the positions that correspond to residues 813 and 836 of the sequence SEQ ID NO: 3,
(iii) Cysteines at the positions that correspond to residues 544 and 941 of the sequence SEQ ID NO: 3,
(iv) Cysteines at the positions that correspond to residues 824 and 560 of the sequence SEQ ID NO: 3;
(D-D) is the substitute amino acids listed throughout rows 3-145 of column #13 in Table 2, wherein each substitute amino acid is located at the position that corresponds to the residue number of SEQ ID NO: 3 that is listed in the same row of column #1 in Table 2, and one of (i)-(iv):
(i) Cysteines at the positions that correspond to residues 744 and 989 of the sequence SEQ ID NO: 3,
(ii) Cysteines at the positions that correspond to residues 813 and 836 of the sequence SEQ ID NO: 3,
(iii) Cysteines at the positions that correspond to residues 544 and 941 of the sequence SEQ ID NO: 3,
(iv) Cysteines at the positions that correspond to residues 824 and 560 of the sequence SEQ ID NO: 3;
(D-E) is the substitute amino acids listed throughout rows 3-145 of column #18 in Table 2, wherein each substitute amino acid is located at the position that corresponds to the residue number of SEQ ID NO: 3 that is listed in the same row of column #1 in Table 2, and one of (i)-(iv):
(i) Cysteines at the positions that correspond to residues 744 and 989 of the sequence SEQ ID NO: 3,
(ii) Cysteines at the positions that correspond to residues 813 and 836 of the sequence SEQ ID NO: 3,
(iii) Cysteines at the positions that correspond to residues 544 and 941 of the sequence SEQ ID NO: 3,
(iv) Cysteines at the positions that correspond to residues 824 and 560 of the sequence SEQ ID NO: 3;
(D-F) is the substitute amino acids listed throughout rows 3-34 of column #4 in Table 3, wherein each substitute amino acid is located at the position that corresponds to the residue number of SEQ ID NO: 3 that is listed in the same row of column #1 in Table 3, and one of (i)-(iv):
(i) Cysteines at the positions that correspond to residues 744 and 989 of the sequence SEQ ID NO: 3,
(ii) Cysteines at the positions that correspond to residues 813 and 836 of the sequence SEQ ID NO: 3,
(iii) Cysteines at the positions that correspond to residues 544 and 941 of the sequence SEQ ID NO: 3,
(iv) Cysteines at the positions that correspond to residues 824 and 560 of the sequence SEQ ID NO: 3;
(E) is:
Glycine (G) at the position that corresponds to residue 588 of the sequence SEQ ID NO: 3,
G at the position that corresponds to residue 656 of the sequence SEQ ID NO: 3,
Serine (S) at the position that corresponds to residue 657 of the sequence SEQ ID NO: 3,
S at the position that corresponds to residue 659 of the sequence SEQ ID NO: 3,
Proline (P) at the position that corresponds to residue 960 of the sequence SEQ ID NO: 3,
P at the position that corresponds to residue 961 of the sequence SEQ ID NO: 3, and
one of (i)-(xi):
(i) F, L, M, W, or Y at the position that corresponds to residue 391 of the sequence SEQ ID NO: 3;
(ii) A at the position that corresponds to residue 423 of the sequence SEQ ID NO: 3;
(iii) A at the position that corresponds to residue 427 of the sequence SEQ ID NO: 3;
(iv) A, H, M, N, or W at the position that corresponds to residue 429 of the sequence SEQ ID NO: 3;
(v) H, I, W, or Y at the position that corresponds to residue 430 of the sequence SEQ ID NO: 3;
(vi) W at the position that corresponds to residue 447 of the sequence SEQ ID NO: 3;
(vii) M at the position that corresponds to residue 449 of the sequence SEQ ID NO: 3;
(viii) T at the position that corresponds to residue 450 of the sequence SEQ ID NO: 3;
(ix) H, I, L, M, N, P, T, W, or Y at the position that corresponds to residue 460 of the sequence SEQ ID NO: 3;
(x) F, L, M, or Q at the position that corresponds to residue 461 of the sequence SEQ ID NO: 3; or
(xi) A, Y, F, R, M, C, G, or V at the position that corresponds to residue 467 of the sequence SEQ ID NO: 3; and
(F) is:
Glycine (G) at the position that corresponds to residue 588 of the sequence SEQ ID NO: 3,
G at the position that corresponds to residue 656 of the sequence SEQ ID NO: 3,
Serine (S) at the position that corresponds to residue 657 of the sequence SEQ ID NO: 3,
S at the position that corresponds to residue 659 of the sequence SEQ ID NO: 3,
Proline (P) at the position that corresponds to residue 960 of the sequence SEQ ID NO: 3,
P at the position that corresponds to residue 961 of the sequence SEQ ID NO: 3, and
one of (i)-(x):
(i) N at the position that corresponds to residue 391 of the sequence SEQ ID NO: 3 and T at the position that corresponds to residue 393 of the sequence SEQ ID NO: 3;
(ii) N at the position that corresponds to residue 423 of the sequence SEQ ID NO: 3 and T at the position that corresponds to residue 425 of the sequence SEQ ID NO: 3;
(iii) N at the position that corresponds to residue 427 of the sequence SEQ ID NO: 3 and T at the position that corresponds to residue 429 of the sequence SEQ ID NO: 3;
(iv) N at the position that corresponds to residue 429 of the sequence SEQ ID NO: 3 and T at the position that corresponds to residue 431 of the sequence SEQ ID NO: 3;
(v) N at the position that corresponds to residue 430 of the sequence SEQ ID NO: 3 and T at the position that corresponds to residue 432 of the sequence SEQ ID NO: 3;
(vi) N at the position that corresponds to residue 447 of the sequence SEQ ID NO: 3 and T at the position that corresponds to residue 449 of the sequence SEQ ID NO: 3;
(vii) N at the position that corresponds to residue 449 of the sequence SEQ ID NO: 3 and T at the position that corresponds to residue 451 of the sequence SEQ ID NO: 3;
(viii) N at the position that corresponds to residue 450 of the sequence SEQ ID NO: 3;
(ix) T at the position that corresponds to residue 463 of the sequence SEQ ID NO: 3; or
(x) N at the position that corresponds to residue 467 of the sequence SEQ ID NO: 3 and T at the position that corresponds to residue 469 of the sequence SEQ ID NO: 3.

31. The betacoronavirus Spike (S) protein, or fragment thereof, of claim 30, wherein (A) is selected, and comprising:
an amino acid sequence that has the substitutions of (a) and has at least 80% sequence identity to the entire sequence SEQ ID NO: 5,
an amino acid sequence that has the substitutions of (b) and has at least 80% sequence identity to the entire sequence SEQ ID NO: 6,
an amino acid sequence that has the substitutions of (c) and has at least 80% sequence identity to the entire sequence SEQ ID NO: 7,
an amino acid sequence that has the substitutions of (d) and has at least 80% sequence identity to the entire sequence SEQ ID NO: 8,
an amino acid sequence that has the substitutions of (e) and has at least 80% sequence identity to the entire sequence SEQ ID NO: 9,
an amino acid sequence that has the substitutions of (f) and has at least 80% sequence identity to the entire sequence SEQ ID NO: 10,
an amino acid sequence that has the substitutions of (g) and has at least 80% sequence identity to the entire sequence SEQ ID NO: 11,
an amino acid sequence that has the substitutions of (h) and has at least 80% sequence identity to the entire sequence SEQ ID NO: 12,
an amino acid sequence that has the substitutions of (i) and has at least 80% sequence identity to the entire sequence SEQ ID NO: 13, or
an amino acid sequence that has the substitutions of (j) and has at least 80% sequence identity to the entire sequence SEQ ID NO: 14.

32. The betacoronavirus Spike (S) protein, or fragment thereof, of claim 30, wherein (B) is selected, and comprising:
an amino acid sequence that has the substitutions of (k) and has at least 80% sequence identity to the entire sequence SEQ ID NO: 15,
an amino acid sequence that has the substitutions of (l) and has at least 80% sequence identity to the entire sequence SEQ ID NO: 16,
an amino acid sequence that has the substitutions of (m) and has at least 80% sequence identity to the entire sequence SEQ ID NO: 17,
an amino acid sequence that has the substitutions of (n) and has at least 80% sequence identity to the entire sequence SEQ ID NO: 18,
an amino acid sequence that has the substitutions of (o) and has at least 80% sequence identity to the entire sequence SEQ ID NO: 19,
an amino acid sequence that has the substitutions of (p) and has at least 80% sequence identity to the entire sequence SEQ ID NO: 20,
an amino acid sequence that has the substitutions of (q) and has at least 80% sequence identity to the entire sequence SEQ ID NO: 21,
an amino acid sequence that has the substitutions of (r) and has at least 80% sequence identity to the entire sequence SEQ ID NO: 22,
an amino acid sequence that has the substitutions of (s) and has at least 80% sequence identity to the entire sequence SEQ ID NO: 23,
an amino acid sequence that has the substitutions of (t) and has at least 80% sequence identity to the entire sequence SEQ ID NO: 24,
an amino acid sequence that has the substitutions of (u) and has at least 80% sequence identity to the entire sequence SEQ ID NO: 25,
an amino acid sequence that has the substitutions of (v) and has at least 80% sequence identity to the entire sequence SEQ ID NO: 26,
an amino acid sequence that has the substitutions of (w) and has at least 80% sequence identity to the entire sequence SEQ ID NO: 27,
an amino acid sequence that has the substitutions of (x) and has at least 80% sequence identity to the entire sequence SEQ ID NO: 28, or
an amino acid sequence that has the substitutions of (y) and has at least 80% sequence identity to the entire sequence SEQ ID NO: 29.

33. The betacoronavirus Spike (S) protein, or fragment thereof, of claim 30, wherein (C) is selected, and comprising:
an amino acid sequence that has the substitutions of (I) and has at least 80% sequence identity to the entire sequence SEQ ID NO: 30,
an amino acid sequence that has the substitutions of (II) and has at least 80% sequence identity to the entire sequence SEQ ID NO: 31,
an amino acid sequence that has the substitutions of (III) and has at least 80% sequence identity to the entire sequence SEQ ID NO: 32,
an amino acid sequence that has the substitutions of (IV) and has at least 80% sequence identity to the entire sequence SEQ ID NO: 33, or
an amino acid sequence that has the substitutions of (V) and has at least 80% sequence identity to the entire sequence SEQ ID NO: 34.

34. The betacoronavirus Spike (S) protein, or fragment thereof, of claim 30, wherein one of (D-A), (D-B), (D-C), (D-D), (D-E), and (D-F) is selected, and comprising:
an amino acid sequence that has the substitutions of (D-A), (i) is selected, and has at least 80% sequence identity to the entire sequence SEQ ID NO: 35,
an amino acid sequence that has the substitutions of (D-A), (ii) is selected, and has at least 80% sequence identity to the entire sequence SEQ ID NO: 36,
an amino acid sequence that has the substitutions of (D-A), (iii) is selected, and has at least 80% sequence identity to the entire sequence SEQ ID NO: 37,
an amino acid sequence that has the substitutions of (D-A), (iv) is selected, and has at least 80% sequence identity to the entire sequence SEQ ID NO: 38,
an amino acid sequence that has the substitutions of (D-A), (v) is selected, and has at least 80% sequence identity to the entire sequence SEQ ID NO: 39,
an amino acid sequence that has the substitutions of (D-A), (vi) is selected, and has at least 80% sequence identity to the entire sequence SEQ ID NO: 40,
an amino acid sequence that has the substitutions of (D-A), (vii) is selected, and has at least 80% sequence identity to the entire sequence SEQ ID NO: 41,
an amino acid sequence that has the substitutions of (D-A), (viii) is selected, and has at least 80% sequence identity to the entire sequence SEQ ID NO: 42,
an amino acid sequence that has the substitutions of (D-A), (ix) is selected, and has at least 80% sequence identity to the entire sequence SEQ ID NO: 43,
an amino acid sequence that has the substitutions of (D-A), (x) is selected, and has at least 80% sequence identity to the entire sequence SEQ ID NO: 44,
an amino acid sequence that has the substitutions of (D-B), (i) is selected, and has at least 80% sequence identity to the entire sequence SEQ ID NO: 45,
an amino acid sequence that has the substitutions of (D-B), (ii) is selected, and has at least 80% sequence identity to the entire sequence SEQ ID NO: 50,
an amino acid sequence that has the substitutions of (D-B), (iii) is selected, and has at least 80% sequence identity to the entire sequence SEQ ID NO: 55,
an amino acid sequence that has the substitutions of (D-B), (iv) is selected, and has at least 80% sequence identity to the entire sequence SEQ ID NO: 60,
an amino acid sequence that has the substitutions of (D-C), (i) is selected, and has at least 80% sequence identity to the entire sequence SEQ ID NO: 46,
an amino acid sequence that has the substitutions of (D-C), (ii) is selected, and has at least 80% sequence identity to the entire sequence SEQ ID NO: 51,
an amino acid sequence that has the substitutions of (D-C), (iii) is selected, and has at least 80% sequence identity to the entire sequence SEQ ID NO: 56,
an amino acid sequence that has the substitutions of (D-C), (iv) is selected, and has at least 80% sequence identity to the entire sequence SEQ ID NO: 61,
an amino acid sequence that has the substitutions of (D-D), (i) is selected, and has at least 80% sequence identity to the entire sequence SEQ ID NO: 47,
an amino acid sequence that has the substitutions of (D-D), (ii) is selected, and has at least 80% sequence identity to the entire sequence SEQ ID NO: 52,
an amino acid sequence that has the substitutions of (D-D), (iii) is selected, and has at least 80% sequence identity to the entire sequence SEQ ID NO: 57,
an amino acid sequence that has the substitutions of (D-D), (iv) is selected, and has at least 80% sequence identity to the entire sequence SEQ ID NO: 62,
an amino acid sequence that has the substitutions of (D-E), (i) is selected, and has at least 80% sequence identity to the entire sequence SEQ ID NO: 48,
an amino acid sequence that has the substitutions of (D-E), (ii) is selected, and has at least 80% sequence identity to the entire sequence SEQ ID NO: 53,
an amino acid sequence that has the substitutions of (D-E), (iii) is selected, and has at least 80% sequence identity to the entire sequence SEQ ID NO: 58,
an amino acid sequence that has the substitutions of (D-E), (iv) is selected, and has at least 80% sequence identity to the entire sequence SEQ ID NO: 63,
an amino acid sequence that has the substitutions of (D-F), (i) is selected, and has at least 80% sequence identity to the entire sequence SEQ ID NO: 49,
an amino acid sequence that has the substitutions of (D-F), (ii) is selected, and has at least 80% sequence identity to the entire sequence SEQ ID NO: 54,
an amino acid sequence that has the substitutions of (D-F), (iii) is selected, and has at least 80% sequence identity to the entire sequence SEQ ID NO: 59, or
an amino acid sequence that has the substitutions of (D-F), (iv) is selected, and has at least 80% sequence identity to the entire sequence SEQ ID NO: 64.

35. The betacoronavirus Spike (S) protein, or fragment thereof, of claim 30, wherein (E) is selected, and comprising an amino acid sequence that has at least 80% sequence identity to the entire sequence of one or more of SEQ ID NOs: 65-104.

36. The betacoronavirus Spike (S) protein, or fragment thereof, of claim 30, wherein (F) is selected, and comprising:
an amino acid sequence that has the substitutions of (i) and has at least 80% sequence identity to the entire sequence SEQ ID NO: 105,
an amino acid sequence that has the substitutions of (ii) and has at least 80% sequence identity to the entire sequence SEQ ID NO: 106,
an amino acid sequence that has the substitutions of (iii) and has at least 80% sequence identity to the entire sequence SEQ ID NO: 107,
an amino acid sequence that has the substitutions of (iv) and has at least 80% sequence identity to the entire sequence SEQ ID NO: 108,
an amino acid sequence that has the substitutions of (v) and has at least 80% sequence identity to the entire sequence SEQ ID NO: 109,
an amino acid sequence that has the substitutions of (vi) and has at least 80% sequence identity to the entire sequence SEQ ID NO: 110,
an amino acid sequence that has the substitutions of (vii) and has at least 80% sequence identity to the entire sequence SEQ ID NO: 111,
an amino acid sequence that has the substitutions of (viii) and has at least 80% sequence identity to the entire sequence SEQ ID NO: 112,
an amino acid sequence that has the substitutions of (ix) and has at least 80% sequence identity to the entire sequence SEQ ID NO: 113, or
an amino acid sequence that has the substitutions of (x) and has at least 80% sequence identity to the entire sequence SEQ ID NO: 114.

37. The betacoronavirus S protein, or S protein fragment, of claim 30, comprising an amino acid sequence with at least 80% sequence identity to the entire sequence of one or more of SEQ ID NOs: 5-114.

38. A betacoronavirus Spike (S) protein, or fragment thereof, claim 30, wherein (A) is selected, which comprises one of the following SEQ ID NOs: 22-29.

39. A nucleic acid molecule comprising a polynucleotide sequence that encodes the betacoronavirus S protein, or S protein fragment, of claim 30.

40. The nucleic acid molecule of claim 39 that is a Self-Amplifying RNA Molecule comprising, from 5′-3′, a polynucleotide comprising the sequence SEQ ID NO: 119; a polynucleotide sequence that encodes the betacoronavirus S protein, or S protein fragment;
and a polynucleotide comprising the sequence SEQ ID NO: 120.

41. A betacoronavirus Spike (S) protein, or fragment thereof, comprising an amino acid sequence that has amino acid substitutions, wherein said amino acid substitutions are (A) or (B), wherein:
(A) is:
G at the position that corresponds to residue 202 of any of SEQ ID NOS:125-134;
Asparagine (N) at the position that corresponds to residue 404 of any of SEQ ID NOS:125-134;
Lysine (K) at the position that corresponds to residue 471 of any of SEQ ID NOS:125-134;
Tyrosine (Y) at the position that corresponds to residue 488 of any of SEQ ID NOS:125-134;
G at the position that corresponds to residue 601 of any of SEQ ID NOS:125-134;
Isoleucine (I) at the position that corresponds to residue 692 and Glutamine (Q) that corresponds to residue 727 of any of SEQ ID NOS:125-134; and
one of (i)-(v)
(i) P at the positions that correspond to residues 691, 693, 818, and 1101 of any of SEQ ID NOS:125-134;
(ii) Glutamate (E) at the position that corresponds to residue 756 of any of SEQ ID NOS:125-134;
(iii) Y at the position that corresponds to residue 801 of any of SEQ ID NOS:125-134;
(iv) Serine (S) at the position that corresponds to residue 879 of any of SEQ ID NOS:125-134; and
(v) K at the position that corresponds to residue 916 of any of SEQ ID NOS:125-134; and
(B) is:
G at the position that corresponds to residue 202 of any of SEQ ID NOS:125-134;
Asparagine (N) at the position that corresponds to residue 404 of any of SEQ ID NOS:125-134;
Lysine (K) at the position that corresponds to residue 471 of any of SEQ ID NOS:125-134;
Tyrosine (Y) at the position that corresponds to residue 488 of any of SEQ ID NOS:125-134;
G at the position that corresponds to residue 601 of any of SEQ ID NOS:125-134;
Isoleucine (I) at the position that corresponds to residue 692 and Glutamine (Q) that corresponds to residue 727 of any of SEQ ID NOS:125-134; and
one of (i)-(v):
(i) S at the position that corresponds to residue 691 of any of SEQ ID NOS:125-134;
(ii) A at the positions that correspond to residues 693 and 818 of any of SEQ ID NOS:125-134;
(iii) I at the position that corresponds to residue 1101 of any of SEQ ID NOS:125-134;
(iv) G at the position that corresponds to residue 756 of any of SEQ ID NOS:125-134;
(v) K at the position that corresponds to residue 801 of any of SEQ ID NOS:125-134;
(iv) A at the position that corresponds to residue 879 of any of SEQ ID NOS:125-134; and
(v) S at the position that corresponds to residue 916 of any of SEQ ID NOS:125-134.

42. The betacoronavirus Spike (S) protein, or fragment thereof, of claim 41 comprising:
an amino acid sequence that has the substitutions of (A), (i) is selected, and has at least 80% sequence identity to the entire sequence SEQ ID NO: 125;
an amino acid sequence that has the substitutions of (A), (i) is selected, and has at least 80% sequence identity to the entire sequence SEQ ID NO: 126;
an amino acid sequence that has the substitutions of (A), (i) is selected, and has at least 80% sequence identity to the entire sequence SEQ ID NO: 127;
an amino acid sequence that has the substitutions of (A), (i) is selected, and has at least 80% sequence identity to the entire sequence SEQ ID NO: 128; or
an amino acid sequence that has the substitutions of (A), (i) is selected, and has at least 80% sequence identity to the entire sequence SEQ ID NO: 129.

43. The betacoronavirus Spike (S) protein, or fragment thereof, of claim 42, comprising an amino acid sequence of any one of SEQ ID NOs: 125-129.

44. The betacoronavirus Spike (S) protein, or fragment thereof, of claim 41 comprising:
an amino acid sequence that has the substitutions of (A), (i) is selected, and has at least 80% sequence identity to the entire sequence SEQ ID NO: 130;
an amino acid sequence that has the substitutions of (A), (i) is selected, and has at least 80% sequence identity to the entire sequence SEQ ID NO: 131;
an amino acid sequence that has the substitutions of (A), (i) is selected, and has at least 80% sequence identity to the entire sequence SEQ ID NO: 132;
an amino acid sequence that has the substitutions of (A), (i) is selected, and has at least 80% sequence identity to the entire sequence SEQ ID NO: 133; or
an amino acid sequence that has the substitutions of (A), (i) is selected, and has at least 80% sequence identity to the entire sequence SEQ ID NO: 134.

45. The betacoronavirus Spike (S) protein, or fragment thereof, of claim 44, comprising an amino acid sequence of any one of SEQ ID NOs: 130-134.

46. A nucleic acid molecule comprising a polynucleotide sequence that encodes the betacoronavirus S protein, or S protein fragment, of claim 41.

47. The nucleic acid molecule of claim 46 that is a Self-Amplifying RNA Molecule comprising, from 5′-3′, a polynucleotide comprising the sequence SEQ ID NO: 119; a polynucleotide sequence that encodes the betacoronavirus S protein, or S protein fragment;
and a polynucleotide comprising the sequence SEQ ID NO: 120.

48. An immunogenic composition comprising (i) the betacoronavirus S protein, or S protein fragment of claim 30, optionally further comprising an adjuvant; or (ii) a nucleic acid molecule that encodes the betacoronavirus S protein, or S protein fragment.

49. A method of inducing an immune response against betacoronavirus; inducing neutralizing antibodies against betacoronavirus; reducing cell entry by betacoronavirus; reducing cell-to-cell spread of betacoronavirus; reducing betacoronavirus entry into cells; or preventing, or reducing the severity of, betacoronavirus-associated diseases; comprising
delivering to a subject an immunologically effective amount of the immunogenic composition of claim 48.

50. An immunogenic composition comprising (i) the betacoronavirus S protein, or S protein fragment of claim 41, optionally further comprising an adjuvant; or (ii) a nucleic acid molecule that encodes the betacoronavirus S protein, or S protein fragment.

51. A method of inducing an immune response against betacoronavirus; inducing neutralizing antibodies against betacoronavirus; reducing cell entry by betacoronavirus; reducing cell-to-cell spread of betacoronavirus; reducing betacoronavirus entry into cells; or preventing, or reducing the severity of, betacoronavirus-associated diseases;
comprising delivering to a subject an immunologically effective amount of the immunogenic composition of claim 50.
